United States Patent Application Publication US 2026/0357256 A1 - sequence listing, part 4

SEQ ID NO: 9 - DNA, 58617616 bp, Homo sapiens (residues 6,513,070-8,684,092 of 58,617,616)
  source 1..58617616: mol_type = genomic DNA
ggagctggcagtgagcccagatggcaccactgcactccagcctgggtgatagagagagattccgtctcaaaaaaaaaaaaaaaaaaagacacacacacacacacacacacacacacacacacacacacacacacacaatgagatacacacagatacatagccctagaatcagaccccaggacagacatagccagactattttcatttttttatttttttagtatttattgatcatttttgggtgtttctcggagagggggatttggcagggtcataggacaatagtggagggaaggtcagcagataaacatgtgaacaaaggtctctggttttcctaggcagaggaccctgcggccttccgcagtgtttgtgtccctgggtatttgagattagggagtggtgacgactcttaaggagcatgctgccttcaagcatctgtttaacaaagcacatcttgcaccgcccttaatccatttaaccctgagtggacacagcacatgtttcagagagcacggggttgggggtaaggttatagattaacagcatcccaaggcagaaaaatttttcttagtacagaacaaaatggagtctcctaagacatagccagactattatacatggttataaacacaacacacgtcgggcgtggtggctcacgactgtaatcccagcactttgggaggccaaggtgagtggatcacctgaggtcaggagttcgagaccagcctggccaacatggtgaaaccctgtctctactaaaaatacaaaaattagccgggggtggtggtgtgcgcctgtgatcccagctactcgggaggcggaggcaggagaatcacttaaacccaggaagcggaggttgcagtgagccaagattgtgccattgcactccagcctgggtgacagagcaagactctgtctccataaaaaaccccaaaaaacaaaaaacacaatacagacttgggtacacacatactacatacatgcaatcaaacatacacagagatatgcaatgtatctgcacagccctacagacagacctggagacacaactcaaaaaaaaaaaaaaaaaaaaaagccagcgcacagacccagggagctgacaacacacgggcatacacgctgggtgctttggacacaaaagccacaccgtagggagttttttctctcattcactcaaacacacattgacccagacgcccccacacaaggacacacacggatggacatacacacgaccgcagtccacaagccagggcagactgccatcccccaagtccagcgaccctcagataaagacagacaagcagactgaccccaacatagtcccttgaatttcaggctgggggtgctcaaggctggtatggaggggctcacccagcatcagatagaaaaagtcagaagcatccaacattttttttttgagacagagtctcgctctgttgcccaggctggaatgcagtggcaccatctcggctcactgcaacctccacctcctgcgttcaagcaattctcctgcctccagagtagttgggattacaggtgctggccaccatgcctgactaattttttcacatttttagtacagacgaggttttaccatgttggccaggctggtctcgaactcctgacctcaggcgatctgcctgcctcagcctcccagaatgctgggattacaggtgtgagccactgcgcccggccttttttctttttttttttgagatggattttcacttttgctgcccaggctggtgtacaatggcgtgatcttggctcactgcaacctctgcctcccgggttcaagcgattcttctgcctcagcctcctgagtagctgggattacaggcatgtgccaccacggccagctaacttttttgtagttctagtagagacagttttcaccacgttagccaggctggtctggaactcctgacctcaggtgatccacccgcctcggcctccaaaagtgcttggattacaggcgtgagccactgtgtccagccgcatccaacatcttggtggtgccggagttctggtgacagtggagtggctggggggcatcctgtgccagtccccaggccactggtgctgagaaaggattcctgctggggtggggccatcaccccacgtggtgaccttttccacgtcaggggagcagagggctttgggatgggttcacccactcagaccaggcctcatggaggaagggtggggtggagaaaccaaggcctccgtagctcctgttagtgatttaagacacagcccccaccccacaccaggggcgtggcaggtctggggtggggtcttggtggatgtacatgcggattatgggtgagggcagagcctgcatgtttggagggcagaacgaatggggcaaggcctaaaggaatcaaagggcggctgcaagtcccagcgaaattggtgagggatgagcatggcttgaaaacctggagtgggaagagggtgcaggactccggaagggcagaacccagaaaaggggctaggggttgagacaggacaaaccctcaaagggggagaggtgccgagcctgaggagagggtggtatggactaagaaaagcagaaaagtgccaggcgcggtggctcacacctgtaatcccacaactttgggaggccaaggtgagtgaatcacctgaggtcaggagttcgagaccagcctgaccaacatggtgaaaccctgtccttactaataatacaataaaaaaaaaaaattagacgggcgtggtggtgcatgtctgtaatcccagctactcgggagcctgaggcaggaggatcacttgaacccgggagtcggaggttgcagtgagccgagatcgcaccattgcactgcagcctggacgacaagagcaaaactccgtctccaaaaaaaaaaaaaaaaaaaaaagcagaaaacagagtggggcacgaagagtctccaggccctattcccaggtcactaatgattgggaaatgggcggggcctgggagaatgacagggaggtgtgagggactgaggagtgggcagggtctgggaggctgataacaggggaagtgggcggggcctggagataatattgggaggaactgtggcgtgggaagggcctggagcggacagcaggggaagtgggcggggcctggggagaatgacagggaagtgggagggactaaggagttagcaagggctgggagacaaataactatgaagtgggcggagtctagggagaatgaccgtggggtaggggaactgaggagtgggctgggcctgggagtctgctggggaagcggacggtcctcgagagaatgacaggaaagtgggaaggactgaggagtgggcagagcctgagaggcaaacggatgggtacgagggcggggcctggggagaagctagggaggtgggaggcggatgacagcggaatggggcttcggtagactgacaggatcagtcgtggaaggggcgggcccatctttctcttgaacccgcgagccaaagccacgttggtgctggtgatcatccaggctgagcgctgggcattcccagtctcgggcgatttcttggcgttacttccaggctgagagccatgactaggcgagcttcggccgtgggaccgaagacctcccaccctcagcactctaacctccccgaccctgccctcgctgtgcctcgttgggaatccgcctccggggtcttccgcggtccaggagccgcacctgccgggtggagacgcggggctggctggggtgcgggagtaggaggtcttcggtccaaccgcctccaacccattcctgcttccgacgttctgttcccgcgcttaatgccctgcccgatccagttccggcctcccatctccccttcccgcgtctccacgctctttccttccccggttctgccgtgaatgctcccaagtcctagagcaccggaactccccgcgcgccttggctcctgggccccagctccgtgcagtcctggactggggctccaggtccaccagggggcgcccgctgcccaagctgggtatcgctgcggagaaaaggggcccagagtgattgttcctcaggggagggagggggaggtccccagagggaagggcctgagtttcctcttgggggatggatcctaggtggtctgaggggtgagtcctgggttccctggcgggagtggatcttgggtggtcctctgtgggtacagggtggaacttgggtgttctgaggggtagtccctggggactcctctgggagcggggcagaccttggatggtcgtaggattggacctggacctctgtgtgtgtgattgtgcatgcccataacgtgtgttcttgcgttatgtctatgactagccatggtgcctgccatgtatgtgtatctacgattgtgtctttgggtgtctgtctcagtgtgtaaccgtgtacgtgtgtgttgtgtacctccatgtctgttttggtatgtgtgtgatggtgtgtctgtgttggtgtgttctagtctcggtgtgtttggttatatgccctgaatatatgtctcttgtgtccttgtgtgtgtctgttgctagctttttttttttttttgaggcagaatcttactctgtcatccaggctggagtacagcggcgccatcttggctcactgcaacctctgcctcccgggttcaagcgagtctcccatctcagcctccttagtagctgggactacaggcactcaccaccacgcccggctattttttttttttttttttttttgtatttttggtagagacagggtttcaccatgttggccaggttggtctcggactcctgacctcaagtgatctgactgccttggcatcccaaggtgctgggattacaggcgtgagacactgcacccggtctgtggctagctttgatggttgttgtgtatctatgattgtgtgtccaggtgtgtgtgtgtgtgtgtgattgtgtgtatgtctgcatggtgtgtctgtatgtctgtcttgttttgtgtgattgtatatgtccagaatgggtgtgccctttgtgttctggtgtctgtgtgtgtctacttgtgtccctcccccaggggagttggaaagtcctttccaggtagttaccctgctgggattccctttccaaagcgggttgacttcccagcaccgtgagctgcctcttcatgctcttggaaggggtcgctgggtctgccccaagtctgcctgggtcttccccaaccctgactcctccttccactgccctcaacagggaaacaccatttcctgcctttgatgtcactaggtacaaaaagtttccttcctccaagtggctctggccactggtttctttctgcgtgtgtgaaagctggccacgattctgtgcttaatgttaaaacaaaaagaataaaacaaagcaaacaaaacgaacccatggaaaatgcaagcatgcaaaatcatacaccatgaaacatccacatcttctcaccccaataccctcaatttttgcacatctttctgaaatgttttatacaaacctatttctgctctgaaacccaaagcgtgcattctgcacatagcagcctgcaccttgctttcgtttctttttttcctcacttggttattcttttaaaggtttttttttgttcccccgagacagaatctcactctgttgcctaggctggagtgcagtggcatgatgatctcggctcactgcagcctctgcctcctgggttcaagtgattctcctgcctcagcctcctgagtagctgggattacaggcatgcgccaccacacctgactaatttttgtatttttagtcgagatggggtttccccatgttggccaggctggtttcgaactcctgacctcgtgatccacctgcctggacctcccaaagtgcagggattacaggcgtgagccaccatgcccagcctctttttttttttttttttttttgagatggagtctcactctgttgtcaggctggagggcagtggtgtgatctcggctcactgcaacctccacctccccggtttaagcgattctcctgccgcagcctcccgagtagctgggactacaggggcccgacaccacgcccagctaatttttgtatttttagtggagacggggtttcattatgttggccaggatggtctcgatctcttgacttcgtatctgcccgcccccgcctcccaaagtgctgggattacaggtgtgaagcaccgcacccggccgcctagccccctttaaaggttttgtaaaccatctgcccaaaaaagcaattacatagaataatcacgccaaattttcaacctaaagttcaaacaggacagagactcaacctgatgggtaaggcccatttcacactaaaaaccttaatctttgaaagagtagaggaggcaaagtctgagtgccttgttctcttagcccttggagatctctgtcaagagatgactcagacatgtttttaatttttaaaccgattctgtgagtaataacctggcagttttccttctgatgaccaatgcagttattttcatcttcaacaattttgcaccacatattcctgcctgccccttgtttttatttatttatttttgtttttttgtttattttgttttgttttgagactgagtctctctctgtcacccaggctggagtgcagtggcatgatctcagctcactgcaacctctgcctcccgggttcaagcgattctcgtgcctcagccttccgtgtagctgggattacaggcgcccaccaccatgcccagctaatttttgttgtatttttagtagagacaaggtttcaccatgttagccaggctggcatgacccactgcacctggccttttttttttttagacaagtcttgccctgtcacccaggctggagtgcaatggcgtgacctcagctcactgcaacttccaccttccgggtttaagggattctcctgcctcagactcccgagtaactggcattacaggtgtggaccaccacgcctggctaatttttgtatttttagtagagacggggtctcactatattgcccaggctagttttgaactcctgagctcaagtgattcgcccccctcagcctcccaaagtgctgggattacaggtgtgagcccccggccatgccttcctttttgcccaaacaagatcaacccatgtacacagtcacgtggaggcaccacactctcagcccactggcagcaatgatggctggtcctattgagcacctgctgtatgccaggcactattctggctccctgattctggacaacagtcccacaaggtggtcactggtgttagtctcatttcatatacggggaaactgaggcacagagagatggagagatttcaaggtcatgtagccagcagaggcagagctgggatttgaagccaagtgagtcaaatcctatgctctggtgctgctcaactggaaacacatcgatgcccgcatgcatcctcctgagtacacagtatcacatcagagacactcagtcccagagtagcaggatgtgtgcctcaacttcacaaagctcacttgctgtgcacaatcataccttgcaagctgggagtggtggttcctgcctctaatcccagcaccctgggaggctgagacgggaggatctcttgaggaaatgctgtggtcgtttcctcaacttcaggagttccagaccagtctaagcgagaatgtaccttgcaactcttttttttttttttttttttttgagacggagttttgctctgatgcccaggctggagtgcagtggcacaatctcggctcactgcaacctctgcctcgtgggttcaagtgattcacctgcctcagcctcccaagtagctgggatgacaggcgcccgccactgcgcccagctaatttttttgtatttttagtagagacgggggtttcaccatgttggccaggccagtctcgaactcctgacctcaggtgatctgcctgcctaggcctcccaaagtgctgggattacaggcgtgagccaccatgcctggcctgtaccttgcaactcttacacaaaaccccaggtgcacacactcgggtgccagtctgtgttttccagagacctggatgtagcttttccagctactcgactcatttggatgatgtaattcccctctctgtgtctcttttctcctcaacatgtgtaaacactcctttatggctctagatcaatctcaggctgggtgttcatgcctgtaatcccagcatttttgggaggccaaggcaggaggatcacttgagttcaggagttggagaccagcctggggaatatagcgagaccccgtctttaaaaaaaaaaaaaaaaaaaaaaaaaaaaaggcctggtgctgtggctcatgcctgtaatcccagcactttgggaggccgaggcgggaagatcacgaggtcaggagaccagcctggctaacatagtggatccctgtctctactaaaaatacaaaaaattagctgggcgtggtggtgggtgcctgtaatcccagctgcttgggaggctgaggcaggagaatcgtttgaagctgggaggcggaggttgcagcgagttgagatcacgccactgcactccagcccgggcgacagtgcgagactccatctcaaaaaaaaaaaaaaaaaaaaaaaaatagcagggtatggtagtgtgcacctgtagtcccagctattaatacatgggaggctggggcaggaggattggttgagcccaggagttccagaccagcctgggcaacatagtgagaccccatctctacaagaaataataataagaataataaaatagctgagtgtggtggcacgtgcctgtagtcccagctactcaggagactgaggtgggaggatcacttgagcctgggagttcaaggctgcagtgagtcatgattatgccactgtactccagcctggccaatagagcgagaccgtgtctcaaaaaacaataagatgcacttcactccacactttcctttcctcttttcttcagttccatctggcccctagctcactccgtagctgtctgactcatgcaaattgctccgctcacaccactaatgctctgttaggcttcactctgccctggggtagatagaggacccaggccaggtaaaagttaaccctcgaagaggtcactggctacatgatgggagacacactacaaggaccctgagaggagaagattgttgctgggaaacaatcaaggtggacttcctgggggaggagtctgttcactcaacctcagaggcagaagaaggagggcccccctggcacagcctggggtgctgtcccttccaactacttcctgtgcaatccctccctcaaggcctgtgatggtgagggtggagagtgaggcccttccccagtgggtgaggaaaaccagggcccacgcttacttcgaggagacagctgagcacagaggtgtgactccagcaaacgtgaggtgctaagagggtgacgttgagtgctccacggtgggcggggccgcctggctcagatgtcccgaccacagtgcgtcacggcgctccctgactgcggcctgagtcttccccaggcgttgaggtcttgtttcccttccctggggggcatgttcagagctccgccaagccccccagcacagataggagttcagaccagtcacagtgagaccttggccaagagacctcactttctggagttttaatttctgtgcccacgttttagggatgatgttgtaccacagagctgtagagaaacgtcagtgaccatcacaatgacaggttgcctttattgaacatttactatgtgctcggcacggtgctcagagcaagctttccactattctttgagatccactatgattcccatttaacacatctgaacaatgagctgaatcagagaagtgaagcagcttgcccaagatcacacagcaaaaactcccactctttctctctcttttttttttcttttttttttttgagacagagtcttgctctgttgtccaggctggagtgcagtggcacaatccccactcactgcaacctctgcctcccgcattcaagcgattctcctgcctcagccccccaagtaactgggattacaggcatgtgccaccatgcccaactaattttttgtatttttagtagagacgggatttcaccatgttaatcaggctggtctcgaactcccgatctcaggtgatccacctgcctcagcctcccaaagtgctgggattacaggcatgagccaccatgcccagcctgtctttctttttttatttttgtttttattttaaagacaaggtcttgctcttttttgcccaggctggagtgcagtggtatgaccacagctcactggaacctctgcctccccaggtcaagcgatcctcccacctcagcctctctgagtagctgggaccacaggtgtgtgccatgacacctggctaattacttttctttttttttttttgagatggagtcttgctctgttgcccaggctggagtgcagtggcgtgatcttggctcaccacaacctctgcctcccgggttcaggagattctcctgccttagtccgccaagtagctgggactacaggtgtgtgccaccatgcctggctgatttttgtgtttttagtagagatggggtttcagtatgttggcccggccttgttttttttttcttgtagagatgggatcttgctatactgcccaggctggtcttgaactcctgggttcaagcgatcctcctaccttggattcccaaagtgttcggattacaggcatgagccactgtgcccatcccacacagccagaactctgaagagctggaattgaagactccacaggcagcaaacatttttctgaaaaggaccagacagtaaatattttgggctttgtgagctagtcagtcccttttcacaactcttcaactccaccatagtgtcaggaaagccaccatagacaatacggaatgaagggaggatcacttgagcctgggagttcgaatgaatgaaggccaggtgcggtggctcaggcctgtaatcccagcactttgggaggccaaagaggtggatcaggaggtcaggagatcaaaaccggcctggccaagacggtgtaaaccctgtctctactaaaaacataaaaattaggcatggatgcgggtgcctgtaatgccagctactcaggaggctaaggcagagaattgcttgaacctgggaggcagagttttcagtgagccgagatcatgccatggcactccagcctgggcgacagggcgagactccatctcaaaacaaaaacaaaaacaaaaacaaaaccagaaaagacaatatggaatgaatgagtgtggctgtgtgccaggcacactttatttatggacagtaaatgggaaagtcatatcatttgcacatgtcaggaaatgttatttttcttttgacatttttccagacattcaaaaacaaaaacaattaagtgaaaggatcttcatctacaaggctgtacaaaaactggcagtgggccatatttagcttttggctggagtttgctgatcctggctctagagtgttcttaacctttatgctataattatttctcttttcattttttttttttttttttttgagatagggtctcactctgtcacccagcctggagtgcagtggtgcgatcctagctcactgcagccgcaaccttctggtttcaagtgatcttccaactcagcctcctaagtagctgggactacaggcatgagccaccatgcccagtggcatcaggatctttaaatctttttaaaattaattaagttttttttttttttgagacagagccttgctctgttgcccaggctggcgagcagtggtgtgatctcggctcactgcaacctccgcctcccaggttcaagcgattctcctgcctcagcctcccgagtagctgggattacaggcatgcaccaccacacccatctaatttttgtatttttagtagagacggggtttcaccatgttggccaggctgctctcgaactcctggccttaagtgatcctcctgcctcggcctcccaatgtgtagggattacacgcgtgagccatcacgcccggcctagagtgctcttaacctttatgctatatttctttctcttttcctttttttatttattttatttattttttaaagataggatctcgctctgttgcccaggctggagtgcagtggtacaatcatacctcactgcagccttgacctcctgggctcaagcagtcctcccacctcagcttcttgagtagctgggaatacaggcatgaggcaccatgctcagcgacatcagtatctttaaatctttattcctggcctggtgcagtggctcatgtgtgtaatcccagcattctgggaggctgaggcgggtggatcacttgaggttaggagttcaagaccagcctggccaacatggagaaaccttgtctctactaaaaggaggcagaggttgcagtgagccgagatggtgccactgcactctggcctggatgacggagcaaaactgtctcaagaaaaaaaaaaatctttattcctggttggtcagcttccttggagagcgaccttctacctatgcatcttctggatcctggatgtggagggagtagaggcaagcgctgagggcatgtgtgtgtcttaatttcaacattcacattccaggttcaatgaacactcctgtttcccactacctgccatttttttttctctttccagaaaccctgccattttcctttctctctctttttttttttttttttttttgctttttttttgagatggagtttcactcttgtcgcccaggttggagtgcaaaggtgcgatcttggctcactgcaacctctgcctcccgggttcaagcaattctcctgcctcagcctcctgagtagctgggattacaggtatgtgccaccatgctggctaacttttttttgtatttttagtagaggcggggtttcaccatgttggccaggctggtcttgaactcctaacctcaggtgattcactcacctccgcctcccaaagtgctgggatgacaggtgtgagccaccgcgcccagcccgttttcctttctgctttttttttttttttttttttttggaaacggagtcttgctctgtcgccaggctggagtgcagtggggtgatctcggcttactgcaatctccgcctcctgggttccagcgattctcctgcttcagcctcccgagtggctgggactacagtgcgcaccaccacgcccatgtaattttttgtatttttagtagagacgggtttcaccatgttggccaggatggtctcgatctcttgaccttgtgatccacctgccttggcctcccaaagtgctgggattacaggtttgagccaccgccccggccattcctttctcttaagggaaaaaaaaaaaaaaaaaaaaaaggctgcacgccgtggctcacacctgtaatcccagtactttcggaggccagggcaggaggacccattcagcccaggagttagagaccagccagggcaacatggagagactccgtctcaattaacatataaaataaaatatcctgtgtgcattcacttaggaaaaaatgcaataaaataaaataaaaaataagaatgaaaaaggacctggcgactcagcagcccaccgaggtagctcacgcctataatcccagcactttgtgaggtcgagatgagcggatcacttgagccaaggaggtggactgggcaatatggtgaaaccccatctcttcaaataatactaaattagctgagcattgtggtgcgcacctatagtcctagctactggggaagctgaggtgagaggattgcttgagcctggcggttgaggttgctgtaagctgtcattacccactgcactccagcctcggtgacagtgtgaaatcctgcctcaaaaaaataaaaattacttagaaagggccaggtgaggtggctcatacctgtagtcccagcactttggggagtctgaggtgggagagtcacttaagcccaggagtttgaggttgcaatgaaccacgatgacaccactgcactccagcctgggcaacagagtgagatgctgtctattttttttttttttgagacggagtcttgctctgtcacccaggctggagtgcagtggtacaatcttggctcactgtgacctccacctcccagattcaagtgatcctcccgcctcagcctcccaagtagctggaactacaagctagtgccaccatgcccagctaatttttgtagtttttttttttttagtagagacagggcttcaccatgttgcccaggctggttttgaactcctgaacttaagtgatccacccgcctcagcctcccaaagtgctgggattacagacgtgagccaccatgctgggctgagaacctatcttaaaacaaaaaattgcttctctgattctctcttatggaaagtggagaggagttggtgtcccttctgcaatttttttttttttttgagatagagtctcactttgtcacccaggctggagtgcagtggcacgatctcggctcactgcaacctccgcctcccgggttcaaggattctcttgcctcaacctcccgagtaactgggattataggcatctgccatcacgcctggctaattttagtatttttagtagagatggggttcaccatgttagtcaggctggtcttgaactcctgacctcaggtgatccacctgcctcagcctcccagagtgctgggattacaggcgtgagccactgcgcccggccttcttctgcaaatttatctatggcaaacttctgtattttagccgccatccaccacattattcatagttgaggggattcaccaacgagtaggtcttaggggtggtggaaatctaaggaaactcacctttccgttctgctggcttgtaattttttttttttggtttacgaacaattgctcaagtgtgactacagtgaagtttcaggagacagtgaaaacagaggctggttcagtttgtcatcttgacccggaagggatggtgtaaagggagacatgagtggtgagaaagtgtctggcagttgcggttctggggaaagaatgttccaggccgaggaatagcagatgcgaaggaaaaacgtgggcacaagtggcattctcaaacttgcggggccgtcggaatcttctggaggacaccccctctgagagtttccggaggtttaggcggggtgctagaatttgcatagctaattgatagtggccctgttgctgggtcgggcctcacacgtggagtacccaaaccgtatataggaagtgtttagcatttggtaatgctccttcaacactagccagtaacattactgttttctctgcaatcccccagggaggcccaatacaggatcagacacagtgctgacctggaagatacttgttctgttgaatgagaagtctaccttatgactgggcacggtaacgcatgactggcatcacagtgctgagaggccaagacaggagcattgcttgagtccaggagtttgagaccagctgagcaacatagcaagaccctgtctctataaaaagtaaaaaattaaaaaaaaaaattggtaggcatggtggtatgtgcctgtagttccagctattcaggagtctaagacaggaggatggcttgaacccaggattggaggctgcagtgggctatgatcgtgccactgcactccagcttgggcgacagagcaagaccttgtatctgaaagcaaaacaaaagtccctttattttatgggctgttgacttctgctagcagagggatgaaaggcgtggtctaccctcccatctcccatggggctgggagatgggaagggagttggccattgtggacccacactggtctgggcagaccaggacttcaacaccagccaagggctttccccgggtcacgtccctctccatctgggagtgcttcctcttttggggccaagttttcaccgcttcttggcccatcctcccagccccggattggccgcctccagcaggccagagcagatgggaaatgtgtttcctccaactcgctcaacactgtccctttcttgcaaggggaatttctccacctggactctccgagcttctgcttgtagggtcccgaggggctcctgccgggaaccatccagtgggtgggtgggggcaggccagggaaggcccaggggtcccggggaaggtggccaggagggctgagcatgacactcagggttccactggggggttggggatcagggggcagatgctccaggagtgagggtggttgaggcttggctgaagcctgacccttcttaggaagtgctggatgtgggggaacccgggggagtcctagtgatggggggctagggggtgctgagaggaggggaaggagacaaagagagactaaagaaggaaaaggagagagacagggagagacagagagtcagagagagacagagggaatcagagacagagagaaacagggagagagacagaaagagtgagagccagagacatacagagacagggagagacacagagatgcataaagagagggagtcagagatggagagagacagagataacggagccagagatagggagagtcagagacagagagaaagaaacacacagactgacacagataaaagagccagagacagggagaggcagagacaaagagagatacagagacagagataacagagccagagacagagagacagagacagagataacagagccagagacagggagagagtgtcagagacagagacagacacagagataacagagccagagatagggagagtcagagacagagagaaagagacacaagacagacatagataaaagagccagagacagggagaggcagagacaaagagagatacagagacagagatagcagagccagagacagggagagagtgtcagagacagagagacagacacagagataacagagccagagatagggagagtcagagacagagagaaagagacagacagacatagataaaagagccagagacagggagagagacacagagacagagacatagagacagagataacagagccagagacagagtcagagacagagacagagagagccagacacagagacagagagagagagtcacagccagagacagcgacagagataacagaagcagagagagggagaaagataacagagccagagacagtcagagacagagatagagagacagagataacagagccagagacagatacagagacagagataacggagccagagatagggagagagagtcagagacagagagagatatatagacagagataacagagccagacatggggagagagagtcagaggcagagagagagaagacagatagagagacagagccagtgataacagagccagagacagggagagagagtcagagagagatacaatgagagacagagataacagccagagacagagttagacagagagatacagagacagagataacagagccagagacagggagagagaattagagacagagatagagagagacagagacagagataatacaggcacagaggcacgcatagacataaattggcagagagagagaaagatctctttccacccactgcagaggcaatcaacagagacagagaaagacgttaacggggagacacagagagcaaaggagactgagtcagcaagagacccacagagataccgggaaagagcggcagagagggagaaccagggcgatggagagacagcagggagaaaggaacctggagccgagcttggaaggccggaaacggaaaggagagcgaaaagcggagagagatccgagtggagaaaattccgcagagtcacggggacgaggggaaaggctctgggctgggaaggggcgtggccgcgggcggaggggcgtggccgcgggcggaggggcgtggcctccttttgtagccaagcagctataaaaagcggcgcgctgtgtcttcccgcagtctctcgtcatggaatacgcctctgacgcttcactggaccccgaagccccgtggcctcccgcgccccgcgctcgcgcctgccgcgtactgccttgggccctggtcgcggggctgctgctgctgctgctgctcgctgccgcctgcgccgtcttcctcgcctgcccctgggccgtgtccggggctcgcgcctcgcccggctccgcggccagcccgagactccgcgagggtcccgagctttcgcccgacgatcccgccggcctcttggacctgcggcaggtgagacgtgccccgaccctcggtagctggtctcgcgggagacccctaccgcccctctgggactcccttctccctcccgcacccccagggacacctgttctacactcccggccggggagaggagacccaccggggctcccattctccatctagcaccgaggccgggggggcacacctttcatcccgcacccctacgacacctcatctgtaccccaggccgggggcggggaggagaccgcccaacagttctttttggaccccccaagggtctccttcttctagtccggggggcacccctttcatcctgcgcccgctacgagaccctatctgtatcccgggagggggagaggagacccccacaagttctttttggacctccaagggctctccttctccgtcttgcacgggagggcacccctttcattccgcatcccgagaccccatcagcaccccaggccaggaggaggagacccccacagtcctcaacccctcagggatacgtcttctgcaccccgggtcggagaaaggctggcttccctccatgtggcagtgggtgggggcacccctcttcattccgcattcccaaggcaccccatctgcaccctggacgggggaccctccgcggttctccaaccctcgacggcttcctttctctatgtaggacttaggacattgagggcacctctttttaccccgcacccccacaagctctgcatctctggggggaaccttttttccatccccgatccgaggggggcacttcctctttatctgggaccgccaaggagacccccagttcctttgctaactcccaaagagccttatccccaacatctgaggtacccctctccctttcaagacccccaggggaatacccccaagggggctggaaagaagagggatcgcttttccctcctgaattcttggagatctgtccttggggcaggttgagccaccagcttcgtgtgtgtgtgtgtgtgtgtgtgtgtgtgtgttcgtgtttgtgtgggtgtttgtgttcgtgtgtgtgtgttcgtgtgggggtgcgtatgtgtgtgtgttcgtgggtgtgtttgtgttcgtgtgggtgtgtgttcgtgtgggtgtttgtgtttgttcgttcgtgtgggtgtttgtgttcatgtgggtgtgtttggatatttgtgttcgtgtgtgtctgtgtgtgttcgtgtgggtgtttgtgtgtgtttgtgtttgcgttcgtgtgtgtgttcgtgtttgttcgtgtgtctgtgtgttaatgtgggtgttcgtgtgtgtgttcgtttgtgtttgtgttcgtgtgtttgtgtgtttgtgtgtgtgtgtgtgcggtctctgttctttagttgggagggaagggaagcgtaggcttcaggtcggcacagactctggggaccctgacagctgaagtgagtggggacagaacctccattttctaggggaacccccatccactttcctcctttctacttttaacagggcatgtttgcgcagctggtggcccaaaatggtaagtatcctccgccacttccggtccctggccccccaccatccccaccccgggatacgaagaagggggaacctggagagtgaggctctgccgcacactggctttgacccttgaccgctgctgtctctgaaagctgctacttcccctctttgaacgccaccgatccctctttctgacttgctctgactctctggatgccatggcctccccatcagacccccatctgggcccacctgggacccctgccctctcagagctggggcttgacacccccaacccccagcctggttttgtgtctctggcctccttcttttcgaaaccctcttccccgctgcttttcttccctctttcctgccccttccccactctcccagcctctcttccctacctcttcccctcgcccagagcctcctccttactcccattctcttccccatccccaggccctcctcctgtccccttccctccccctagaccctcctccctgccccttccccaaaccctccccagccccatgctctcccagtttccaagacactcctcccagcaccttccctccccgtccagagacttcttccccgctcgagacctcttcccccttcccctcccagagacccccttcccccttcccctctccatctagagatcacttccccctttcccctccccctccagaaaccccttcccccttccctctcccctccagagaccccttccccctccaaagaccccttcccccttccttccccctccagagacccctttccccttccctccccttccagagaccccttccccctccccctccaaagaccccttcctccttcccctccctctccagagaccccttcccccttccctctccctccagagaccccttcccccttccctgccccctccagagtccccttcccctccagaggccccttcccccttccccctccccctccagagacaccttctcccttctccccctccagagaccccttcccccttccctccccctgcctaagactcccctccctgccatcttctctccttggtgcttccttctccctaacccctcccccaccccttcctgctccctttgcctttcttcgaagtcctctcttaccaggtcccctgtccacccctcttaaagttcccttgattccctgatggatccttcctctagaacttcctcctttcctaacagtcttccctctccctcctagctccctgtccacctctcctctcccctttccttccttctctcccttctcctccccccatctccatcctgtccgagatctgctgctccctccaaccccctcaccgccctctccaggagtccccttacccctccccgaggcctcttccagccagactcgcctggccttttgcttttcaccccctcttcctcttcctgcatgtctttccccgcacccgcatcactccttccccacccaacctcttggagttttgccctgtcccgactcttgtccttctccctggattcccttcctctgttctatccccgtctttccctcccctagctctacccctgctcagagtcccgcccccaacaacctcagttctcttcaatcagcacccccccaacgccccccccacccaggctccccgctctgctcccctgtcccgctccctgccccgccattccccgccccccggcccctgacccgttcttttctcccagggctgcgctgacatgttcggtgctcagccacgctcagctgtgctgggacatgctcagctaagctaagtgcatgctttcctcccacagttctgctgatcgatgggcccctgagctggtacagtgacccaggcctggcaggcgtgtccctgacggggggcctgagctacaaagaggacacgaaggagctggtggtggccaaggctggagtctactatgtcttctttcaactagagctgcggcgcgtggtggccggcgagggctcaggctccgtttcacttgcgctgcacctgcagccactgcgctctgctgctggggccgccgccctggctttgaccgtggacctgccacccgcctcctccgaggctcggaactcggccttcggtttccagggccgcttgctgcacctgagtgccggccagcgcctgggcgtccatcttcacactgaggccagggcacgccatgcctggcagcttacccagggcgccacagtcttgggactcttccgggtgacccccgaaatcccagccggactcccttcaccgaggtcggaataacgtccagcctgggtgcagcccacctggacagagtccgaatcctactccatccttcatggagacccctggtgctgggtccctgctgctttctctacctcaaggggcttggcaggggtccctgctgctgacctccccttgaggaccctcctcacccactccttccccaagttggaccttgatatttattctgagcctgagctcagataatatattatatatattatatatatatatatatttctatttaaagaggatcctgagtttgtgaatggacttttttagaggagttgttttgggggggggggggtcttcgacattgccgaggctggtcttgaactcctggacttagacgatcctcctgcctcagcctcccaagcaactgggattcatcctttctattaattcattgtacttatttgcttatttgtgtgtattgagcatctgtaatgtgccagcattgtgcccaggctagggggctatagaaacatctagaaatagactgaaagaaaatctgagttatggtaatacgtgaggaatttaaagactcatccccagcctccacctcctgtgtgatacttgggggctagcttttttctttctttcttttttttgagatggtcttgttctgtcaaccaggctagaatgcagcggtgcaatcatgagtcaatgcagcctccagcctcgacctcccgaggctcaggtgatcctcccatctcagcctctcgagtagctgggaccacagttgtgtgccaccacacttggctaactttttaatttttttgcggagacggtattgctatgttgccaaggttgtttacatgccagtacaatttataataaacactcatttttcctccctctggagagttggttgttaaattaccagcacacgctgtccgtctctgctctacagagctggccagtttcttcagccccatagtttccccaccatacagatctttcacggccacccctataactagacacatcctctggctggctaagatagccctgtgattctgcaacccagggcttaacatgtgatttgtggggagaggaggatggttccccccaattctggtccaggagccagtgtcaaatctgattagtcaaatctgattggtcaccgcctgtctggtagcgggttgtttgcctgttttgaataagacccctggcaacaggtgattcaattctctcgtcccagctgattgggtcaggttggacacgtgacttgagctgggccaatcaggtctccccagaaatgtgggtgggctggaccacagaggctagagagtggagaagaggaagttgtgcaaagactcaggtgtgaccacagagttccagagagacaccagagctactttgatttccttcttgcctcttgctggtgacatgggttgccattttaatggcaaaactgcaataacttttgcctcaacctaatagatttctagggctgccataagaaagtaccgtaaagtgggtggcttaaagcaaacgagctttgttctcgctcggttctgcaggccagagtccaaagtcaaggtcttgacagggccatgctcattctaaaggctccagggagaaggccttcgttgcctcctcctaagttctggtggttgccagcaatcctccagtctctgcctctgttggtcacatggctgtgttctttctgtgtgacttcatttctttgtctcttcttcctgtttttttctttgagatggaaggagtctcactctgtcacccaggctggagtgcagtggcgccatctcggctcactgcaacctccacctcccgggttcaatcaattctcctgcctcagtctcccgaatagctgggattacaggcacatgccaccacacccagctaatttttctattttaatagagactgggtttcaccatgttggccaggctggtcttgaacttctcctgacctcaagcgatccacctgccttggcctaccgaagtgctgggattacaagcatgagcctctatgcccggcctcttcttcctttttatgtattgttttttttgtagagacagggtcttgctatgttgcctaggctggtcttgaactccgagcaacgctcctgcctcagactcccaaagtgccaggattacaggtgtaaggcaccaggcccgaactctcccctttttataaggacaccagtcatgctggattcagggcccatcctcttccaatatgacctcatcttaatttaaataattacatctgcaaagaccctatttccaaagaaggtcattaatatagtttggctctgtgtccacacctacttttttctttttttttttgagaaagactctcatcagttgcccaggctggtgtgtagtggcgcagtcttggctcactgcaacctctgcctcttgggtttaagtgattgtcctgcctcagccccctgagtagctgggattacaggtacaggccaccactcttggctattttttttgtatttttagtggagctggggttttgccatgttggccaggctggcctcgaactcctgacctcaagtgatctgcctgccttggcctcccaaagtgatgggattacagacgtgagccaccgtgcctggcccccttggggttctgagctcccctaagctaaaatcaagttgactgaaggattgctttccttctggaggctctagaggataattgctttccttgtttttccaacttctagaggcttgtttttaatttaatttaatttaattttgtaaagacggggtctcctcatgttgcccacgctggtcttgaactcctgacctcaagggatcctcctgtcttggcctcccaaagtgttgggattacaggcgtgagccactgcacctggcaattttatttatttttttgtagagatgaggtcttgctatgttgcctaggctggtctcaaattcctgggcttgagcaatcctccaccatctgtaagaattaaagaaagaggaaagaaacatgaaaggtggcttaacagtcaaggacaggtttattttagagaaaataaacctgagaggggcttctagccgagttaggtcagaggcacactctcttacagactaggagtttttaagcatttattcagggagtttatcagaggcttggactgcttctgtgtttctttctttctttttttttttttcttagttgaagtctcactctgttgcccaggctggagtgtggtggcacaatctcagatcactggaacctctgcctccctggttcaagtaattctcctgcctcagcctacagagtagctgggactacaggcatgtgccaccacgcccagctaatttttgtggtttttttttttttttttttgagacggagtctcgctctgtcacccaggctggagtgcagtggtgtgatctcggctcactgcaagctccgcctcccgggttcatgccattctcctgcctcagcctctggagtagctgggactacaggcgcctgccaccacgcccggctaattttttttgtatttttagtagagacggagtttcactgtgttagccaggatggtctcgatctcctgacctcgtgatctgcctgcctcggcctcccaaagtgctgggataataggcgtgagccaccacgcctgccccacaaagaattacaaataaagctttcactcttcttatgtaaagacctgacaatgcatacaatggtccactgttgatttggaagcagggacagttttctattacagtctgttgattgtattgtataattgttaagggaaaaaaggaaaattatatttctgtttgtttgtttgtttgttttgagatggagtctagctctgtcacccaggttggagtgcagtggtgcgatctcagctcactgcgacctccacctccctggttcacaagcaattctcctgcctcagcctcttgagtggctggggttacagacatgcgccaccacgcccagctaatttttgcatttttagtagagacagggtttcaccatgttggctaggctggtctccaacttctgggctccagtgatccacccacttcagcctcccaaagtgctgggattacaggcgtgagccaccatgtccgcccacccccccggtatttcttattggaactgtttttcttgtttgaggtttcttttccataccctgaatctacaatgacccaaccataaccttgcttctgaggcccgttctctgatgagaaagtttagttccaaatggggaaagtacctgagttccagccttttcagcctgactttgcatctatttagagatagggtcttacaggggtgatcacgttaaaatgaggtcattagggtaagccctgatccaatatgactgatgttcttataaaaggggggctttggctggatgtgataggggggctcctgcctgtaattccagcactttgggaggccaagccaggtggattgcttgagcctagaggcttgagaccagtcatgggcaacatagcaagaccccgtctctacaaaaaatacaaaaatttgctgggtgtggtggtgcatacctgtagtcccagctgctagggaggctgagatgggagatcactagaaccttgaggtcaaggctgcagtgagctgtgattaccactgcaatccgctctgtgtgacacagcaagatcctgtctccaaaagaagtgagggtagggggtggaatttggacacagacacacacagggagagcaccacgtggagaagaaaatggaatccatggtcaggctcggtggttcatgcctgtaatcccagcactttggtggatcactggaggtcaggagtttgagatcagcctggccaacaaagcgaaacctcgtctctactaaaaatacacaagttagccgggtgtggaggcgttcacttgtcatcccagcatcccagctactccgtctcaaaaaaaaaaaaaaaaaaaaaggaaaatgtcatctacaagccaaggagagaggcctggaacagagccttcccttacagccctcagacggaaccacatctgccaatgccttggttttggacttccagcctctagaactgttagacaataaatttctgctgttgaagcccccaatatgagctactttgttataacagccatatcaatttaaaaagagaattaaaggagttgataatttttttttttttttttttttgagatggagtctcactctgtcacccaagcagactgcaatggcacgatctcagctcactgcaacctccgctcccgggctcaagcgattctcccaccttaccctcccgagtaagtagctgggtctacaggcgcatgccaccatgtctggctgatttttctatttttggtagagacagggtttagccatgttggccaggctggtcttgaactcctgacttcaagtgatccacccgcctgggtctctcaaagtgtagggattacaggcgtgagccactgcacccagccaggaattgatactttaatacactttcaatgcacagtgtctggctcctggttagcattcattaaacggtagcaattattaaggacactcaaatggacagaaagaatgttacagaaacacaatggtacaatagaggggttgcggccaggcacagtggctcacacctgtaatcccagcactttgggaggctgaggtgggtggatcacgaggtcaggagttcgagaccagcctggccaatatggtgaaaccccacctctactaaacatagaaaaattagctgggcatggtgacaggcacctgtaatcccagctactcgggaggccgaggcaggagaattgcttgaacctaggaggtggaggttgcagtgagctgagactttgccattgcaccccagcctgggtgacacagcgagactccatgtcaaaaaaaaaaaaaaaaaaaaaggctgattcaaaaagctggcaagcaaggccaataatagagagagtaaaaatactatgagagatagtgaaataagagatagtgaaaatagtatacattgagcaggatgtgttgagagatatgacagacaaggcaacacaaaggtgcattgctcaagcagtgacacacagatttacagatgacatcatacaataacagatgtgggtattagaaagaagcaacagctcacagaagagtggttaccatgacacagctgtgatgttatagagatatcgccaagctgggcatggtggtacatatctgtggctccagctacttgggaggccgaggcgggaggatctcttgagcccaggaggtcgaggctgcagtgagctgtgatcacaccattgtactctagcctgggcgacagagagacaccctgtcttaaaaaaaagaacactcttgccaagaagggagttacaaagtcataatgttataaaagcaattatgcaaggataggatattgtaaacagccacagctttataatatcatagccacgactctaacgttgccaaacagaaagacaaatactacacgatctcacttatatgcggaatctaaaatagtcaaacacatagaagcagagaatagagcggtgcttgccaggggctgtgggtggggaaaacgaaaggtgttggtcaaaggataccaacattcagttaagaaagatgaggccgagcgcagtggctcatgcctgtaatcccagcactttgggaggctgaggcggatggatcacccgagatcgggagtttgagaccagcctgaccgacatggagaaacctcatctctactaaaaagagaaaattagccgggcgtggtgctgcatgcctgtaatcccacccactcgggaggctgaggcaggagaatcacttgaactcaggaggcggaggttgcagtgagcggagatcacatcattgcacaccagcctgggcaccaagagcaaaactccatctgaaaaaagaaagaaagaaagaaagatgggctgggcgtggtggctcacgcctgtaatcccagcactttgggaggccgaggcgggtggatcatttgaggtcaggagttcaagaccagcttggctaacatggtgagaccccatctctactaaaaatacaaaaatgagccaggcgtggtggcgagtgcctgtaatcccagctacccaggaggctgaggtaggagagtcgcttgaaccttggaggtggaggttgcagtgggtcgagattacactactgcactccagcctgggagacagaacgtgactctgtctcaaaaaaaaaaaaaaaaggtgtttttattggattaataaggaacccccttcttcttcctctttttttttttaattttgagatagggtctctctctgtcactcaggctggagtgcagtggggtgatctcggctcactgcaacctctgcctcctgagttcaagtgattctcttacctcagcctcaatagtagctgggactacaggtgcacaccacatgccaggctaatttttatagtttttggtagagatgtggtttcaccatgttggccatgctggtttggaactcctaacctcaagtgatccactcgccttggcctcccatagtgctgggattacaggtgtgagccaccatgccctgccaagaacccccttcttctaccagacagaagccaaggtgcactgacttgggagcagattatgggctagatttgagccttcactcacatctgtagcccagggactaaatatatgtttatatataaatatgattgggtgtgatggctcatgcctgcaatcccagcacgttgggaggccaaggcaggaggatcacttgagcgcaggagttcaggactggcctgtgctacgtagggagaccctgtctctgcaaaaaattagctgggtgcaacggtgtgcacctgtagtcccagctacttgggaggctgaggcgggaggatcgcatgaggccaggagtttgaggctgcagtgagccatgattgcactactgcactccattctaggtgacagaaccagactctctctttctctcatcagatatatatatatatatatatatcagaggctaggaagaggggagaggggatgaggaaaaataaagaatacaaatgtatttattatcattgaactgaacccttaataatggaaaaaatggtaaatcatatatgcacattttacatatataatttaacattatatctatatataattcacatacatagtatattcatatacctaaagctggaaaaaatgctaatctcgcaagcagaaaattgactttgtcataactcctttggcagctgaacttgactgtgcccatgtaattgtattgatgatctttattcattgtataacctgcgatgaaacagggatgtttacatgagtcaagtatgcttgattatgagggggtgttccaggagcccccagagggggtaatccatgctacacatatcatactacctttctacattctaatttttttttttttttgagacagagtcttgctctgttgcccaggctggagtgcaatggtgcgatctcagctcactgcaacctccgcctcccgggttcaagagattctcctgcctcagcctcctgagtagctgggattataggcatccaccaccacgcccggctaatttttttttttttaatctttagtagagagagagtttcaccatgttggccaggctggtctcgaactcctgacctcgtgatctgcccgcctcggcctcccaaagtgctgggattacaggcgtgagccaccgcgcctggcctctaaattctagatctccaaatctggcttctagggtttgggatcagggaatgaggatttgtccaaaggcatggggtgggaaaaaagactgtttgtttacaagaggtaagatgtcaggaagcagcaatgtgcttacaccactgaggtaggtgtgcccctttcaggggggagtttccattctggggatccccattctgaggtttcccagaaggggacagttttcaagcccactttcctgacggttgcatcttgtcgcaggtttcatctcacctttgtcttgctgcccgcaatctctggcttggtcagctcaggaaacccctggtgccagagatccggatgaagatgagggactagttcggcctgttgcggtatctcagcggggtgagacgcctcggtggggaaggcagagtggaaaacccgacgccttccaccagcaactcttgtgaatatgtgtgtgttggggttatgtggctagccaggagtggagatggatagtgtggtctgcagaggatgcattttggagctgacagagctgagtttgagccctggttctgccagtgctggctaggctgtgcacccctgggcaagggtcttcacctctctgggctcatgtcttcagttataaaactggaaaataattctcatgggctcttgggagatttatttatttatttatttacagacgaattctcgctcttatcccccaggctggagtgcagtggtgcgatctcagctcactgcaacctccgcctcccaggttcaagcgattctcttgcctcagcctcccgagtagctgggattacaggcgcctgccaccacgcccggctaatttttgtgtttgtagtaaaggtgtgtttcaccatgttggccaggctggtctcgaactcctgacctcaggtgatctgcctgccatggcctcccaaattgctgggattacaggcatgaaacactgtgtccagtgctcttgggagttttaaatgagctaacagtttcaattgcacagtggctgacattggatttcatatgtgaaatctgttgttattattattaacattattattattattttttgaaacatagtttgtgatgttgctcaggctggagtgcggtggtgcgatcttggcttactgcaagctccgtctcccgggttcaagcgattctcctgcttcaccctcccaggtagctgggattacaggtgtgagccacctcacctggctcatttttgtatttttagcagtgacagggtttcaccctgttggccaggctggtctcgaactcctgacctcaggtgacctgcccgtcttggcctcccaaagttttgggattacaagcgtgagccactgtacccgacctgtttttgttttttttttttaaattttattttgagatggagtctcgctctgttgcccaggttgtagcacagtctcgctctgttgcccaggttgtagcagtggcgtgatctcggctcactgcaacctctgcctcctgggttcaagcaattctcctgcctcagcctcccgagtagctgggattacaggcacctgccaccacgctaatttttgtatttttagtagacatggcgtttcaccatgttggccaggctggtttcgaactcctgacctcaagtgatccacctgccccggcctcccaaagtgctgggatgacaggtgtgagtcactgagcccacctcaaactttgtttttcctctgctctaacaccaccaccaccaccgcaatcatcaatacagaagacttctgtgaccaaatgtgtggggtttttttccccacacacctagcagcggacaccagctgggtgtttcggggtgtcttccaattcaattccgacatcatctacgtggagatggtgtcagattgcacaggctgggggcttagtccccaggagtgacgcccacgcccctagataccagttgcaagtctgggcctttggaaggttttttatttatttatttatttattttttagatggagtcttgctctgtcaccaggctggaaagcagtggcacgatctcagctcactgcaacctctgcctcccaggttcaaacaattctcctgcctcagcctcccgagtagctgggactacaggtgcgcaccaccatgcccagctaatttttgtattttcagtagagatggggtttcaccatgtcggccaggctggtctcgatctcttgacctcatgatctgcccgcctcagcttcccaaagtgctgggattacaggtgtgcgccaccatgcccggctaatttttgtattttttagtagagatggggtttcatcacattggtcaggctggtcttgaacttctgacctcgtgatctgccggccctggcctcccaaagtgctgggatgacaggcttgagccactgtgcccagcctggagcttttgactgattggcttcaagttggggttcccacgaccccttgtttgagttggatcaatttactggggtggctcacagaactcagggaaatatttatgttcactgatttattataagtgatgttactagggatacagacgaagacatgcatggggtgaggtatgggggacgtggggtggatctttcatgccctccctggatgcaccgtcctctgggatcctcctgtattcagttaactggaagctccctgaacccagtcttttggcatttccatggagacttcattacataggcatgattgattaaaccattggccattggtgatcaacttgaccttcagcccctctctcctcctcctgaaggttgggggctggggctgaaagtctcaaccctctaatcctgccttggtctttctggtgaccagcctcaccttgaacccatcagacaaaagatatacaaaagacagcactttgaagatgccaaggattttagtagttctaagccaggaacagtggacgaaagcctgtatatataataatgccgcaaacagggtagacggtggaggcatttatggacttggggaacctggaggatcatagatcactttgaattgtgcgggatttccagatgtcgctgagggactttgaccgggatggccaagggggagtgttgaatcctttctgtagctatgcaagctctttgcctggaatgcacatttgagagttgttggtatattttatataatgcaagttttgggggcaggatgaatctcttacgcagacaaataaaggtgtagaagagaggaaggtctaagctcaagtgccaagaaactctgatacataacagaaggcatatgtatatgtattagagatgggtttcaccatgtgccaagaaactctgatatataacagaaagcctatatatgtatatatatatgagattgggtttcactgtatgtgtgtgtgtgtgtgtgtatatatgtatgcagtgtctggaagtcaggtgttcagcatatttggagatttggaggggtgaccagacaggaaagaaaaaaaataagtttcgagaaatgtgtttgaagaagtaagtggtggtcagtggtgtctaattcaacttctgagagtctgtcaggatgagaagctgaggcaggaagggaggtaggcaccatgtccggccatgaagttggcaagaatcccctgaaacaggccagggagatgaatgaagaagataaggctttgaggcaaaaacgatgtccacatctacacagtatttagctcccatttatgccaagaccagcttggttggggagaccctaagccagcggcgctagaggaattaaagacacacacacagaaatgtagaggtgtggagtgggaaatcaggggtctcacagccttcagagctgagagccttgaacagaggtttacccacgtatttactaacagcaagccagtgataagcatcgtttctatagattatagattaactaaaagtatcccttatgggaaacgaagggatgggccgaaataaaggggtgggtctggctagttatctgcagcaggagcatgtccttaaggcacagatggctcatgctattgtttgtggtttaagaacgcctttaaacggttttctgcccttaaagaacacctggtgggccaggtgttccttgccctcactccagtaaaaccacaaccttccagcatgggcgtcatggccatcatgaatatgtcacagtgctgcagagattctggctagttttggggccagtttatggccagactttgggggggcctgttcccaacacatttataagtgagagcatgcagtatttcactttctgtttatgagttgtttcacttaaaggtaatggtctccagcttcacccatgttcctgcaaaagacatgatttcattttatttatttatttattttttgagacagagtctcattttgttgcccaggctggagtgcagtgatgtggtcatagctcactgcagcctcaaactcctgggctcaagtgatcctcctgcctcagcctcctgtgtagctagggctacaagagcgagccactggggctggctaatttttaaaattaattaattacttgctgtgttgcccatgctggagtgcagaggtgtgatcacagctccctgcagccttgacctgctagtctcaaggaatcctcccacctcagccttctaggtggctggtactacaggggtgcaccaccatgcctagctaatttttgtgtgtgtgtatatatatataaaatatacatatataacatatatttatatttatatatattatatatttatatttatatattatatataaatatatatttatatttatatatatttatatatatatgtttttgtagagacagggtcttgctatgttgcccaggctggtttagaactcctgagctcaggcgatctgcctaccttggcctcccaaagtgttggaattacagttgcgagacactgcacccagcctaaatttatttttgtcttatatttctatttaatatttgaggttgaatatgatgaatagaaatacaagcgaagtaaataattttaaataataaaggcggggcatggtggctcatgcctgtaatccagcactttgggaggccaaggtggtggatcacttgaggccagaagtttgagactagcctggccaacatggtgaaatcttgtctctatcaaaaatatgaaaagtgagctgggcatggtggcacgtgcttgtagtcccagctactcaggaggttgaggcatgagaatcgcttgaacccaggaggcggagattgcagcgagccaagatggcaccaccacactccagcctgggtgacagagccagattctgtctccaaaaagaaagaataaatgtgtaaaaaagaatatttaatattatatacatttataaataaacatgttatttatattttatattatatatattttattttatttttaacttttatttttccaatatatacactttttaaaaatatgccactggcccttgagaaaaaatttatttgcactgctagcattcttctactgcagtattagcatttcatataggcactactcttccatttcctacttacattcatttgggctattgttacaaatacagtatgcaattgaagaaaactaatggggggcccagtgtggtggctcacacctgtaatcccagcacttctggaggccgaggtgggcgatcacctgaggtcaggagttggagaccagcctggccgatatggtgaaacttcttctctaaaagtacaaaacttagctgggcatgatggtgtgcacctgtagtcccagctacttgggaagctaaggcacaagaattgcttgaacctgagaggcagaggctggagtgagccgaaattgagccactgcactccagcctgggtgacagagcgagaccctgtctcaaaacaaacaaacaaacaaacaaaccaaacaccaaacaaaaaaacccaaaaaacaaactagtggggaaacgaagctttatatatgtttttcctctttacagcttctcaatatcatgccatttaagtgaaaatttatatggacattttctgtacatatcttgaagggcagagattacactgataaaaccaaaataattgtgcaaggctgggtgcagtggctcatgcctgttatcccaacactttgggaggctgaggtgggtggattacctgaggtcaggagtttgagaccagcctgggcaccatggcgaaaccctgtctctacaaaaaatataaaaattagccaggcgttggtggtgcacacctgtaatcccagctactcagaggctgaggcaggagaattgcttgaatccaggaggcagaggttgcagtgagccaagatcgtgccactgcactccagcctggtcaacagagtgagaccctgtctcaaaaaaaaaaaaaaaaaaaaaaaaaaaaaaaaaatcccaaagcatttaatttgaccaaaaacctctgtaaatagaaatactcagaatgttctttagttagctctctctcaaatatcaagggtgcactgagttcagggcagaaatcacgtgtgaattagttccaatggtatacaaacacatggaaacactaaattaaaagctgccttcctcaaagtgtagtgaggcctcaaaaccactctaactgtaacctcagtcaccaagacagaggacagactgaacatttacctctgcataacaaatgtggctctggcacacctgttatctatccaaattattaactttctttgcctttctagaaaaaggcctattattgaacattaaccatattctaattttaaatgtaattcatttcttaaaaaaaaccactgtctctgaacagataaaaatggcttacataggccaggtgcagtggctcacacctgtaatcccagcactttgggaggccaaggtgggtggattgcctgagctgaggagttcgagaccagcctgggcaacacagtgaaaccccatctctactaaaatacgaaaagctgggcatggccgcgtgtgcctgtaatcccagctattcgggaggctgaggcaggagaatcacttgaatctgggaggtggaggttgcagtgagccaagattgtgccactgcactccagcccaggcgacagagcaagactccctctcaaaaagaaaaaaaaaaaaaaaggcttacgtaatactgttacagaatctttagggtgtcacatttctggtcggaaatatctgtgtcccctggcacctttgccagagttcttgtcttgtgtccaggaagaatgagttacacagggaagtggagggtgaacaggatgaagaggagttttattgagtgttagaacagctcagagaagaccaaagtgggcagctcctctctgtagacagttcattccattgagtgctcagctctcagcagagaggagaccccagagagggtagttcctctctggtcctcctgatggctgcaggtctcagcagagaggaggccttggagagggtggcttctctctgcccagcaggtcatcccatcctcactgcagctttcagcagagagtgtagctcctttctgcagctggtcgtcaggtcatctccagctattagcacagagagtggcttctctctgcagctggtcatctggacgtctctctttttctctgccctgctctggctgagcctggggcttttatggacctcagaggggatgcagtgtgtgccgactggtccattaacagccatgcatgggcctggaaaaggcatcacaagtccccactctggtccacaggtctggtggccctcagccttcaggccctccctggcctgaaggtggggtcttagcgaggacttgctcccttctgccaggaatcagtctgcctcctgctgccgttcatggccccaggttggaccctgactttgctccaagatcagagcaggcgctgagagcagggagaaaccaggcagtgggagcaggtgctttggagcctgcaagggcaggggggcctccctggccccccaagagcacagggaggcttgaatctgcggccacaacttgggcggctgcagaggcccaggatgcagcttcaggtgctcccccttgcaagctggggcggggattcctgatccttgccgggcctgggctggcgcccagggcaggggcaatatcaccacgaactgcccctgttgccccggcactcaggggcagcctgtggggagctgatcctggccccagcctggccacggggagtggcaggcttggtggtcgctctgatgcggggtggaccccaagaacacggctggcaagccctgcacagagcctcctcctgatgcctaggaaccctgaaccctctgcggggtgggtgcagtggctgcgcggctggctagtccccaaagagggcgctgctccctcttcctgcccccgcccccaaagcacggccccagctccacatccgggcccctctctgcccgaccgcgctgctccagcagggcgtgggctccagagggctgtgggctgcgtggccggggagctgtcagcctcctccctgggccctccctgcagcagccatgtgatggcagcagccagacagcccaccacagccatcaataccacacgaattttcacaataagctggacaaactttccctggtggaaaaattagtctgtggccgggtgtggctggccctggctctcccaggaggttttcatgacgtaacctgccaatttgataaatctctgcctcatagagtcacaaacgttcttctctagatgagaagttctccatgattccataaatataaattttaaaaaatttaacctggggccgggcgcggtggctcatgcctgtaatcccagcactttgggaggcggaggtgggtggatcacctgaggtcaggagttcaagaccagcctggccaacatggtgaaacccttgtctctactaagaatacaaaaattagctgggcgtggtggtgtgtgcctgtaattccagctacccaggaggctgaggcaggagaatcgctggaacctgggatgcggaggttgcagtgagccaagatcacgccactgcactccagcctgggtgacagagcaagaccccgtctcaaaaaacaaaacaaaacaaaacaaaaaaaacaaaaactaactttaagttcaggggtacatgtgcaggtttgttatatgggtaaacctgtgtcatgcgggtttgttttacaggttatttcacccaggtgctaagcctagtatccattagctatttttcctgatcctcttcctcccccaaccctccaccgtctgataggccccagtgtgtgttgttctcctctatgtgtccatgtgttcttatcatttagctcccacttataagtgagaacatgcagtatttgtttttctgatcctgcgttagttttctagggataatggcctctagctccatccatgttcctgcaaatgacatgatctcgttcttttttatggtgcatagtattccgtggtgtatatgtaccatattttctttatccattctaccattgatggccatttaggttggttccacgtctttgctattgagaatatgctgcaatgaatatatgcatgcacgtgtctttataatagaatgatttatattcctttgggtttacacctagcagtgggattgctggactgaatggtagttctgtgtttaggtctttgaggaatcctcacactgttttccacaatagtggagctaatttacattcccaccaacagtgtaaaagcgttccttttcttagaagacaatacctttttttgttgttgttgttgttgagacggagtctccctctgttgcccaggctggagtgcagtggtgtcatcccagctcactgtaacctccatctcccgggttcaagcaattctcctgtctcagcctcccaagcagctgggattacaggcttgcatcaccacgcccagctaatttttgtatttttagtagagatggggtttcaccctgttggccacgctggtctcgaactcctgacctcaagtgatccacccacctcagcctcccaaagtgtcaggattacaggcgtgagccaccgtgcccaggcaagaagggaatatcttaatgacaacttctccccgccgctttcctcgccaaaattcttcacattcacctttgccagtgttcctgtaacaacaatagttttcacaattgttctctgaacaagcaatggtagacctgatccagagcctgatattgtcatatcataaattaaatcttttaatgtagttccctctgaaataaaaggataatctttttttttttttttttgagacggagtcttgctctgtcgtccaggctggagtgcggtggcgcgatctcggctcactgcaggctccgcccccccagggttcacaccattctcctgcctcagcctcccgaatagctgggactacaggcgcccgccaccacgcccggctaatttttttgtatttttagtagagacggggtttcactgtgttagccaggatggtctcgatctcctgacctcatgatccgcccgccttggcctcccaaagtgctgggattacaggcgtgagccaccgtgcctggcctaataaaaggataatctaatgaagggtcctctttatttgacacttgatggtgagtgacagtgcggttgtggcagaaacagatcattaacatgagtgagatgcagaggaggcaatgacagctgccagttctatgagacctgggccaggcgacggcttcatagtagttgagtgttttattttattgcaatggtcctgattgcagcaacatattgtggtcacagacccggtttatttatttatgttttttatcttaaacaatttttttttgaggcagtctcactgtgttgcccaggctggagtgcagtgacacgatctcagttcactgcaacctctgcctcccaggttcaagtgattctcctgcctcagtctcccgagtagctgggtctacaggtgtccgccatcatgcctggctaacttttgtatttttagtagagatggggtttcaccatgttggccaggttggtctcgaactcctggcctcaagtaatctgcccacctgggcctcccaaagtgctgggattacaggtgtgagccaccacacccaacgagacaatagattcttgtaaactatagacacccaattgagctaacaaactctaggtcttacttcttttatcaaactgtgtatttgtacccattaatcagcttctcttcattctccccctcaagaataaacttttgtaaaaaagaatcatggagaagctcattctctcttcagttgcttttgctcagccatttctaccttagctatgagttaaaagtaaacccagcctgggcaaggtggctcatgcctgtaatcccagcactttgggaggctgaggcgggcagatcacttgaggtcaggagctcgagaccagcctgtccaatatggtgaaacctcatttctactaaaaatacaaaaaattagccaggcttggtggcaggtgcctgtaatcctagctacttgggaggctgaggcaggagaatcacttgaacctgggaggtggaggttgcagtgagccgagattgcatcactccactccagcctgggtgacagactgagactctgtctcaaacaaaacaaaacaaaagtaaacccagcctggtaaatccgggcagactctgtggctcagtttttgttcttctctaaaatttggtctcatgtggaacccacacattcccacacattaaaaaaaaattaaaagataactgaaaacatttactggagtttgaaccatgggagtcacagggtgattttacaagggctatttttaatcatgggagtgaatctagcggcatgagtggcttgagaaattagtgacaagggaagaatttaagatagcctatagaatgagcttcttttagaagactgttttagggaaataacttcaaatgtaaagcaaagtaggccgggcatggtggcgcatgcctgtcatgtcagcactttggaaggctgaggtgggagggctgcgtgagcccaggatagagactgcacctcagcctggcaacagagacagactctgtctcaaaacaaaacaaaaaggaaggttacatgaatgaaaagtgtacaaggaatacccattgtgtctttcacccagattccccagttaatattcgggcctgcttgcgttatcatttgctctcctcatctctctctctctctttctctgtctctttccctttctgtccctatctctgtctctctatatctctctatctttctatctctatctctttgaaatttgtttaaattttgttttttattttctctatttttgttattttttcttccttttttctctctatctctttatctctatgtatttctctatttcaatctctcgatctcttcatctctgtctctgtctctctccatctctatctctctatctctatctgtttctctacctatctatttctgtctctatctcatctctatctttctatctctacctatctttctatctctatccctccatctctatctctttctatctctctgtatctctctttgtatctcaatctctctatctcaatctctgtctgtatctctctatttctgtatctccatctctatctatctgtatctctctctctatgtctatctgtccatctgtatctctatctctatatctccatctctatctatctctgtctttttcttcacgtctctacctctgtctctttatttcaatctatctcttgatctctctatatctctgtatcccctatttctctatctttctttctctacttctctatctctagctctccgtctctcaatctctccctatctcttcctctgtctcccgatttcccctctcgtctcccttgtgggtatgatttagaagtttcatttatgatgaatctgacaagatcgaggttaagaaacaaagccagaggaaaccacaggctcagaggccagggaagttctgggaaattccccatgcagtgtgagaggatttgagaaacaggagggagtcttggggcatttgtgaaggcgatttcttagaaagaaacacaggactagtcgggtgagctttgctccgtcctttggcccatgttttaagcagatcaaatggtatcattagcccttgggggtataaaatatcaactaatcagcagtcctcttttctttttttaaacatttttattatttttttttaacatagagtctcactgtgtcacccaggctggagtgcagtggcgtgatcatggctcactgcagcctcgacctccttcctaggctgaagcaatcctcccacttcagcctcccaagtagcgtgactaaaagcacacaccaccatgcccaactaatttttttgtttttttaactttttggtagagacaggggcctctccatgttggccagcctggtctcaaactcctggggtcaagcaatcctcccacgttagcctcccaaaatgttgggattacaggtgtgagccactgcaccagctatgcccacatttttctaggtcaatgatacggaataaaaagaaagaaagactagtttctgctctcaagcagtttatattttagagtcaaatctagcaggtgaaatctagtccatggcctgttttttttttctgagacatgctctcactgtgtcacccaggctggagtgcagtggcaccatcatgggtcactgcagcctcgacctcccagactcaagcaatcctcctgcctgagctccccaagtagctgggactacaggcatgtgtcaccacgcccggctagttttttatttttatttttgtagagatgggatcttgccatgttgcccaggctggtctcgaactcctgagctcaagcgatccacctgccttggtttcccaaggtgctgggattacaggcgtgggccactgtgcccggcctccttgcctgtttttgtaagtgaagtttgattggaatgcagccatgatcatttgtttatgtaatgtctataattgccttcatgctgcaatagcagagttcagtagctgcaacagactgtgtaacccctgtggatatgcacatatagggggttagagaagggaagagagagagagattttaagaaatttcctctcatggccgcgcccggtggctcacgcctgtaatcccagaactttaggaggccgaggcgggcggatcatgaggtcaggagatcgagaccatcctggctaacacagtgaaaccccgtctctactaaaaatacaaaaaaaaaaaaaaaaaaaaaaaaaaagaaaagaaaaaaagaaaaaaaaaagaaaaaaaaaggaattgtctcacatgattgatgggactggcaagtctgaaatctgcagggcaggctggacaccccggggagagttgttgaatctgaagtcagagactagaggcaggactccttctccctgtggaggatttcagtctttttctcttaaagccatcaactgattggttgaggcccacccacattatggaggatctcccagggactttacccaaagtctgctgatttaaatgttagtccctaagccaggcgctgtggctgtaatcccagcactttgggaggtcgaggcaggtggatcccctgaggtcaggagtttgagaccagcctgggcaacatggtgaaaccccatctctactaaaaatacaaaaattagccaggtgcagtggcgcatgcctgtaatcccagctactcaggaggctgaggcaggagaatcttttgaacccaggaggcggaggttgcagtgagctgagatctttcggcctcccaaagtgcagggattacaggtgtgagccactgtgcccagccttgtatcctaactgctatatctcttcccttctttgtgtaccaaggtagttctgatattccaacttcatttggtgtaggtcactttctggtccatgattgaagcaacatgccaaactgttagagctcttaaaatttttaaaaattatttatttattttaatggataccctggtacccagttatctccataatatttaggtttccagattcagtggcagtattttcactgtaatttctgaactaatttatttatttatttttgagacataatctctctctgttgcccaggctggagtgtagcagtgtgatctcagctcactgcaacctctgcctcccaggttcaagtgatcctcctgcctcagcctcccaagtagctgggatcacaggcgcacgccaccacatccagctaatttttgtatttttttgtagagatggggtttgaccatgttggccaggctggtcttgaactcctggcctcaagtgatccacccatctcggcctcccaaagtgctgggattacaggcatgagccactgcacctggccgaatttttgcatttttagtagagatgggtttcaccaggttgcccaggctgatctcaaactcctggcctcaagtgatccacccgcctcggcccctcaaagtgcagggattccaggtgtgagccaccatacctggcatttatcttgtttttaatataggatggtaatgccttctttagatcatgtatgttaaatatgctttagaaacaaaaatttccttgatattttgacaaacctacgcttccttaggttaattttcataagtgttaatttttatattactaatcactgtactgctatagctaaatcaactagatatcagtttgtgtagtgttgctcaaaagatgtacaaatagcaagtttgataattgcttcaaaaatgagctttttaaaataaagaaagcaataatgttccaagtcagtggcagggggcaaaatacatacaacaaacatattgagacagagtatcaagtgcccatcagtttctcttataagaataacatgcttgaggaaggtcttgagaaaatcctccctccctctactaaacttttagtttccacatagtgtcggatgttacaattggtatgaaggataaatgcttttaggcaaaagtaaaaagctatctacaggctgggcgcggtggctcaagcctgtaatcccagcactttgggaggccgaggcgggcggatcacgaggtcaggagatccagaccatcctggataacacagtgaaaccccgtctctactaaaaatacaaaaaaatagccgggcgtggtggcgggcgcctgtagtcacagctactccggaggctgaggcaggagaatggtgtgaacacgggaggtggagtttgcagtgagccgagatcgcgccactgcactccagcctgggtgacagagtgagactctgtctcaaaaaaaaaaaaaaaaaaaaaaaaagctatctacaaagcaaaatccatagtgactttttgtaggaggctctcatctctggtggtaatattctttagtacttatacagcatagaggaaattgaaacaatattttggatacagtagcaattatttcttatagtcttactaaatgttacaaaattcctaaatatatgtaaatattcttcttaccacccattatgcaccagtttggggctgcctgatgaagtggctactgtttttgttttttctcttttttgacagggtcgtccaggctgcagtgcaatggcaggatcatggttcactgcagcctgaacctctttggctcaagcagtcctcccacttcagcctcctgagtagctgggactacaggcgggtgccacgtgtggctcatttttgtattttttttgtagatatggggtttcgccatgttttccaggctggtctcaaagtcagaggctcaagtgatatgcctgcctcagcgtcccaaagtgctgggattataggcgtgagccactgcacccagccatggctactattttaacagttaaacattgcacctaggccaggcacggtggctcatgcctgtaatcccagcactttgggaggccaacgtgggctgatcacctgaggtcaggagttcgaggccagcctggccaacgtggtgaaaccccgtctctactaaaaatacaaaaattagctggggaaggtggcaggtgcctgtaatcccagctacttgggaagctgaggcaggagaatcgcttgaacctgggaggcagaggttgcagtgagccaagatcgtgccactgcactccagcctgggtgacacagtgagactctgtctaaaaaaaaaaaaaaaaaaggaaaaacaaaacaaaaacaaaaattgcacctcaaaagttctgccatccatgcacaagaaacgggcacaatagtgaggactcctcagagatggcaaactacttcccaagtgaaaagttagtgatagagtgtctccaaattagaggagagagggacatgggtaagggaggtaggtagagcaaaaggactttaaaataatactgcttaggagtgtgtatgcgtgtgcatatatatgccatcacacccacctaattgttaaaaatttttgtagaaatgaggtctcactatgttgcccaggctggtcttgaacacctgggctcaaacactcctcccatctcagcttcccaaagtgctgggattacaggtgtgagccgctgtttccagccaggagtgtttttttttaaaatttatttaattaatgcatttgtttatttatttagagacagggtctcactctgtctcccaggccggagtgcagtggcatgatcttgcctcactgcaacctctgcctcccagattcaagagattctcatgcctcagcctcccaagtagctgggactacaggcatgtgccaccacgcctggctagtttttgtgtttttagtggagacagggttttgccatgtttggccagggtggtctcgaactcctgacctcagttgatctgcctgtcttggcctcccaaagtcctgggattataggcatgagccattgcaccctccagtagtgtttttttgtttgtttcttttttcttttcttttctttttcttctttttcttttttttttttgtttttgtttttttgagatggagtcttggtttatcgcccgggttggagtgcagtggcatgatcttggctcactgcaacttctgcctcctgggttcaagcgatcctcctgcctcagcctcccaagtagctgggatgtagacgtgtgccaccacaccctgctaatttttgtatttttactagaaatggggttttaccatgttgcccaggctgctcttgaactcctgacctcaggtgatccacctgtcttggcctcccaaggaattacaggcatgagccatcacacctagccaggagtgtttatttttaagataacttctataccttgtctgtccttgatcctaatccttgaataactcatgttcgtgctaaatacaatttctactctaaaggaagaggagtggtctgttaggagaagcatattttaaggagaagacacgaagacatctctgtcataaatgcaagtttacttggtgagtcttttggttacattactacattaactgtttctgctgctatttcaatctctttatcattgggacaggtattgttgaacatatccctactacttgtattcgttaggtatctccagatgccagtcattccttttttttctatatttttttattttctatatttatttatttatttttgagatggagtctcgctttattacccaggctggagtgcagtggtatgatctcggctcactgcaacctccgcctcccgggttcaaggtattctcctgcctcaccctcccaagtagctgggattacaggcacccatcaccaagcctggctaatttttgtatttttagtagaaatgggtttcaccatgttggccaggctggtctagaactcctgacatcaagtgatccacccaccttggcctcccaaagtactgggattacaagcatgaacaccgtgcctggccagtcattccttttggaatatcaaagttgtgactttttttttgacaatatgcagtttgggcagcagatggcaatcagctaatgccattttattgccattcagaaatttatgtgtagaaaacttagtgtcctgcatgctattttcatcaatttcatcagggagaggagaattcagatattcataagtttttgcagttttttttttaacttttattttagctaccagggtacatgtgcaggatgtgcaggtttgctacataggtaaatgtgtgccatggtgatttgctgcggagatcaacccatcacctaggtattaagcccagcattcattagctattcttcctgatgctcttcctctccttgccccactgacaggccccactgtgtgttgttctcctccctgtgtccattgttcagctcatagttataaatgagaacatgcgacatttgattttctgttcctgtgttagtttgctgagaataactgctccagctccatccatgtccctgcaaaagacatgatcttgttcctttttatggttgcatagtattccatggtgtatatgtaccacattttcttcatccagtctatcattggtggacatttgggttgattccatgtctttgctattgtgagtagtgctgtagtgatcatatgcgtgcatgtatctttataacagaatgatgaatattcctttgggtatatgcccactaatgggattgctaggtcaaatgtttttcctgcttctagatctttgaggaatcaccacactgtcttccacaatggttgaactaatttacactaccaccaacagtgtaaaagcgtttctttttctctgcaacctcaccagcatctgttgtttcttgactttttaataatcaccattttctgcagggtttttaagagatgcttcactcatgcttcattaacctctggccttgaattcttgatctatgcagagaatttggcaaagatgtccattccagcagtatttgattctgggtgttttggtgaaagctttaagtacttgggaggacataagacttcttcaggagcttcctcaatcttatttgacttcactgttgaaagttataagtggtgggtggttcccaggagccttgttttgcagatctgcaggtttcctttttcagatcaacagttgtgacactgaagacaactcctttgagctaaagaatcatgaggaatctctgggaaaaaaggcagattcctgtgctttcaccatcactgacagccttgacccagagctcaaggaggggctctttgtcttcctccttcaacttgttcagtggcatcgacaatgccaaggccaggtcagctgggctttgcaaacgttggcagctgctgcttctgctccaaggctgctctggctgatggctttggccatgctgctcactggacagtctggcattgaggtggccatggcctcagctcctcagcactgcaccacactgcagattgagccacttcttcaattggccttaaatttatcaaagggaaattgtctaggtgagcctgagttaatcacacaaactctataaatctgaatgtagaagtcaaatatcaagaaagtcagaagccagagagattcagaccttgagaaggatttgacctgtcgttgctggctttaaaggtggtaaggaccacatgaaaaaaacccaagaacatcttctaggagcagagtgatccctggctaacaatgagctaaaaaaacaggggcctcagttctacactgcaaggaactgaattctgccaacaacactaatgagtttgaacacaattcttccccagactccagatgaaaacacagcttggtcaactccttgattgtataaccctgagaatagaacccatataaatcttgcccagattcctgatgaagacaccatgaaaataatgaatgagtgttgtttcaagccactaagtttgtgatgatttgttacacggcagtagctaactaatacagagttatgtggccaacctgttgattgggatcaacagtcttattttgcaaagatacttcagaaccatggacagtggaacgcatgccaggggagagctgattggctggattagttaccatccaaactggagtgatcctattggacaatctttgacctagccactgatccctggtccagtcagattttgttagggtctacagactcaacttctctgccaaccatgaagatggtgcctcaggagtcctgtaaggtcttgagtgaacaagtctctgcctagttcttcagaaggatattgcaccaccctcttcctcatctacattagcctcctttggcttctccttcccacttcccagctattgcccagtgatgttcctgcagtcaggaactcccttcctttctctctttgatactttctatcctttacctagccaactctcattttttttttttttttttttttgagacagagtctctctgtcacccaggctggagtgcattggcatgctcttggctcactgcaacccctgcctcccaggttcaagcaattcttatgcctcagcctccccagaaactgggattacaggcgcacaccaccataccaggctaactttttttttctttttcttttattattatactttaagttctagggtacatgtgcacaatgtgcagttttgttacatatgtatacatgtgccatgttggtgtgctgcacccattaactcgtcatttacattaggtatatctcctaatgctatccctaccccctccccctatcccacgacagaccctggtgtgtgatgatccccttcctgtgtctgagtgttttcattattcagttcccacctatgagtgagaacatgtggtgtttggttttctgtccttgtgatagtttgctcagaatgatggtttccagcttcatccatgtccctacaaaggacatgaactcattcttttttatggctgcatagtattccatggtgtatatgtgccacgttttcttatccagtctatcattgatgggcatttgggttggttccaagtctttgctattgtgaatagtgccgcaataaacatacatgtgcatgtgtctttgtagcagcatgatttataatcctttgggtatatacccagtaatgggatggctgagtcaaatggtatttctagttctagatccttgaggaatcgccacactgtcttccacaatggttgaactagtttacagtcccaccaacagtgtaaaagtgttcctatttctccacatcctctccagcacctgttgtttcctgactttttaatgatcgccatcctaactggtgtgagatggtatcccattgtggttttgatttgcatttctctgatggccagcgacgatgagcattttttcttgtgtctgttggctgcataaatgtcttcttttgagaagtgtctgttcatatccttcacccactttttgatgaggttgtttgattttttcttgtaaatttgtttaagttctttgtagattctggatattagccctttgtcagatgggtggattgcaaaaattttctcccattctgtaggttgcctgttcactctgatggtagtttcttttgctgtgcggtaatttttttttgttgagatggagtctcactctgtcacctgggctggagtgcagtagtgcaatcttggctcactgcaacttctgcctcctaggttcagtgattctcctgccttagcctcccaagtaactgggattacaggtgcctgacactacactcagctaattttttgtgtttttagtaaagatggggtttcaccatgttggccaggaaggtcttgaactcctgacctcaagtgatcctcccaccttggactcctaatgtgctgggattacaggcatgagccaccatgcctggcctgatatctctgaaatttaaaaactatttagaatctcactgggacttatgtgctttcattgctaatgatctgctgctaaacctgtataagccccttccctctaggctcagggactgtcacataagaggtgggcatgtgagattgtaagggccaaatttgagggatagaattatttcagaccctcctactcaagcatgggcacacagatgcccaaacatctgccaaaataagactgtgtcttggcctactatgttgcctctctccatccatcccaaccataaaaagttttgctctccatagaattaaacaaaaattacggaaagatatccagatacctggtgtattagtctgttttcatgctgctggtaaagacagacccaattctgggtaatttatacaggaaaaaggatttacagttccacgtgtctggggcagcctcacaatcatgaaggaaggcaagaaggagcaagtcacgtcttacatggatggcagcaggcaaaaagagagcttgtacagggaaaccctgtttttaaaaccatcagatctcatgagacttattcactatcatgagaacagcatgggaaagacctgcccccatgattcaattgcctcccaccaggtacctctcacaatgtgtgggaattcaagatgagatttgggtggtgacacagccaaacaatatcacctggtgacaaagccttctggatatagtgctcccagtaataaaatgatgccaattatataaacaattttatcagccaccttaggaggaattactaaaaagactacaaaaagccttgcagcacattgaaagtctctaaattccttagcttaaatggttttaggaaaatgcttatgttttgtatagctaattactacaagcgtgtaactacaaccaagattacagtagctcaatgcatagaacttaaatagatgccaattttataacctcgccttttggcatttgatttttggctctcatgttacctaaagggttcccagggttaatgagaacctgcccaccgccattcccatctggcctggaatatttagttggctataaacattttgactccaaatcccttgggcatggggtcccaccgagggacatgttgggcctgggtaggcagacacaccaccccagcaataatatgggacaaaatagaagtttggccatcgatgttgcatctggcatataatgaccaaaaaaagggggaatgtaaactgataattaaatcccaagctccctcttcccactgctactgacagaatggatccctccttggccaagggaagcccctgtaaaaaaccttaaaaacttagttcccagacataatgggatgggaggccaggcataccttctttttgtggtttagacacaaaaactgaccaccattaatggtcaaataaaaatcacaagacagaacaggctttctgtaacaataagatagcgaattaagccaggtatggtggcgtgcacctgtagtatcaggttgccaggtccgatctgtggaccctgacccagtgatggatgaaagacgtacactgacacagacattttgcctgtcagtgtggctaaggggctctgctgcctgagtccacagcattggcctcgataaactggcgaagtttgcatttatttagtacagattaaatgacaaatgtctcaagtaaacaccactggagggtaattaacattgctgacctcctgagtagagagcagtcatgcacccgcagatgaccaaaggtcagtcttaggaccacatgagtaaacaagctatttagataaattcctctacattcctatgtatctacgccctaagcttttaagagaattcagctgcctccagccaaatcttttactgaagtgatgcaaactacccggccttccaagaaagtttgtgtctatttcctataactctataatttctcccaccaccctgaccaatctcctacaccaggtatttgggagactgaggtgggaagatagcttgagcctgggagttcgaggctacagtgagctatgactgtgccactccagtccatcctgcgtgacagagcaagatcgtgtttcaaaaaaaaaaaaaagataccaaattataaacagaacctaagaccatgccagcaaaggttaaatcacacactccttcacttaaaaagtaaactatgttcatcccagcactttgggaggctggggtgggcagatcatgaggtcaggagatcaaaaccatcctggctaacatggggaaaccccatctctactgaaaatacaaaaaattaaccaggttggtggcatgcgcctatagtctcacctactcgggaggctgaggcaggagaatcgcttgaacctgggagacggtggttgcagtgagccgagatcacaccactgcactccagcctggatgacagagtgagactccatctaaaaaaaagaagtaaactatgttctaaatgccacaaagtttttctttttcccaagcagccaaacaagcatttgcctctagataagcaacgttaaagcactttgcagctccactggatgctaactgaccaccagccataactatggctttaattaggcaagagacttatttcagtaactttttcctgatgaagaaaccactgaccacgggctagatctggctggtttacagaaattgcaagcttgtgtgcctttttgtcctgaaaagaacttttgatctatagggcttaatagtaatatttttattctattctattctattctattctattcttttttttttttttttttgagatggtatctcgctctgtcacccagtctgaagtgcagtggtgcgatcttggctcactgcaagctctgcctcccgggttcacgccgttctcctgcctcagtctcttgagtagctgggactacaggcgcccacgaccatgccaggctaattttctgtatttttagtagagacggggtttcactgtgttagccaggatggtctcgatctcctgacctcatgatccacccgcttctgcctcccaaagtgctgggattataggcgtgagccaccgcacccagctttcttttcttttcttttctttttgaggagtttcactcttgttgcccaggctggagtgcagtgatgtgatctcagctcactgcaacctctacctcctaggttcaactgattctcctgcctcagcctcctgagtagctgggactacaggcacaggaaaactcctgtttttaaaaccatcagatctcgtgagacttattcactatcacttatagccccactatgcccagctaattttttttttgtatttttagtagaggtggggtttcaccatgttggtcaggctggtctgaaactcctgacgtcaaatgatccacccaccttaacctcccaaaatgctgggattacaggtgagccaccatgcctggccccacaatatctttaaatcaatgactctcctcatggtttggataaggtccctccagatggaaaaatttgcttgtgattttagccatgattatagggatagctttatttttctaccctggactgtattgctgttgcatgctatgtatgggaatgcaagactggctttcccagaggcttctttttttttttttttgagatggagtctctctctgtcacccaggctagagtgcagtggcgccatctcggctcactgcaagctccgcctcccgggttcacgccattctcctgcctcagcttcctgagtagctgggactacaggcgcctgccaccatgcccggctaattttttgtacttttagtagagacggggtttcaccatgttagccaggatggtcttgatctcctgacctcgtgatctgcccgcctcagcctcccaaagtgctgggattacaggcgtgagccaccacacccggctgctctgatctttattatttctttcattctactgagtctgggtttggttggctcttgcttttctagttctctaagatgcattgttagtgtgtttattttaagtttttcttcttttttgatgtaggtgcttatagctaaagcttccctcttagtactgctttcactgtaccccataggttttggtatgtcatgttttcattatcatttgttttgaggaatttctgaatttattttttaattcttcattgacccactggttgttcaggagtgtattgtttaatttccattgtgtttgtatactttccaatatttctcttgttattgatttctagttttatttcattgtggtcagagaagatgcttgatattattttaattttttttgaatattttaagacttgttttgtgacctaacatatggtccatccttaagaatgatccaagtgctgaggaaaaggtgtttattctgcagctgttttcaatgtttattctgcagctttatttaacgtttattctgtagctgttgaaagaaatgttctgtaaatatctattaggttcattttgtctatagcgcacattaattctgatgtttctttgttgattttctggctggaagatctgtccggtgctgaaagcaggttgttgaagtttccagctattattgtattggggtctatctctcactttagctctaatagtatttgcttgttatatttgggtgctccagtgttgggtgcatatatattaacaatggccatattctcttgctgaattgatccctttatcattgtataatgaccttctttgtctcttcttatagtttttgtcttgaaacttattttgtctaagtatagctactcctgctcttctttggtctccattggcatggaatatctttttccatcccttcattttcagtctgtgtgtatctttataagtgaagtgtgtttcttgtgggcaacagatcattgggtcttgtttctttttttaattcattcagtgaccctatatcttttgattggagactttagtccatttacatttaatgttattattcataagtaaagacttacttctggcattttagtttgctttctggtcttcctttccttctttcctatcttgtttttagtgaaggtgattttctctggtggtttaatttaatttattgctttttatttgttttgtatccattgtatgttttttgatttgaggttgccatgaggcttgcaaatactatcttataaccattattttaagctgataacaccttaacactgcttgcataaataaacaaacaagcaagcaaaaagaatactagtaaaaattctaactttgcaggcagggtgcagtggctcacgcctgtaatcccagcactttggggggctgaggcaggtggatcatgaggtcagacgttcgagaccagcctggccaacatagtgaaaccccgttgctactaaaatacaaaaaattagctgggtgtggtggcgggtgcctgtaatcccagctactcgggaggctgaggcaggagaattgcttgaacctgggaggtggaggttgcagtgagctgagatggcaccactgcactccagcatgggtgacagtacgagactccatctcaaaaaacaaaacaaaactctaactttgccttcctgctttttaactttttgttgtttctgtttatatcttattgcacagtctgtgtcttgaaaagctgttgtaggtattatttttgattgttttatcttttagtctttctagttaagataagagtcctttatgcaccacagctacagtcttataatactctgtgttttttctgtgtacttactattaccagtgagtgttgtaccttcggatgatttcttactgctcattgacaaccttttctttctgactgaatcactttccctcaaattcacttagggacccagagcactccaccctgcagtggcaaggcttgctggaactcaagccctgaccactgaaatgggtgattccgctctggttagggccagtccaactgcttcccctatggatgggtcagctggggacagcccagttccgctttctgctgtgacaagtgagcagtgaattcaatgcaaagcctcacaattgctgcgctttccccctcccaactcacagactctctgtccacatggttgctgctggggggggtgggggaggggtggcattggcaattcaagactgtctttccttccctcttcagtgcctctttcagcgatatgaagtcaaaaccaggcactgtgagtgctcacctgatttttgggtcctaggaaggcactccctttgtgtagctagttgtcaaacttggtgctcctgttggagggatgattggtggcactctttatttggccaccttgctctgcccttcccagaagattctcttgtgtaagcccagggacttgtgaatcctttcaactccaggtggataggttctaccccatggctgcctaattctgccccttttcagcaggaagtagccagaatggatgcatcacctgttttccatagaaatggaatggagtttgatggtggggatttcgtaactggggacttcagtttaaaaatatattttatttattaatttttttattaggatagtcaagtgaagcagtgggagtggagaaggaacaaagaaatatgtaactggttgtgaacaattagttgtaaacaccactgcacttggaccagcctaaaaagatattttaattgccgggtgcggtggctcatgcgtgcattcccagcactttggaaggctgaggtgggcagatcacctgaggtcaggagttcaagatcagcctggccaacatggtgaaaccctgcctctactgaaaatacaaaaaaattagccgggtgtggtggtgggagtcataatcccagctacttgggaggctgaggcacaagaattgcttaaacccgggagaaggaggttgcagtgagctgagattgcaccactgcactccaacccgggcgagaagagtgagactccctctaaaaaaaaatatatatatatgtgtatattcatttatttataagtatctatctatctatctatctatctatctatctatctatctatctacacacatatatacttttaatcaccctcctctcctctcacctcttcattccttccctctctagatactcccttctggcaatgcatgcttatctaattaggcacttccttgagaaattccagaggctaatcttaaaacaaaccaggcaaatcaggagccctgattacagaatcctttcacttagggagagccactaatactaatggttagtccaccatcatttggacaaagtcaagataataccaaccagacccctgaacagacgacaacccaagttagccattggaacaagacacacagaccccataccgtgcaccattctactccacatctcccatactgaagtggcattgttgtctggggtaaatacctgggagtcgtcctcttgcaccaagaagattaacaatatggacacacacacatggaatgggttaagaagcagaaagtttaataggcagaagaaaggagagaagaggagcagctctctccctctttcgagagagaggtgtctgaaaaggaaaaagtggtggacctcatcagattttacaggcaggcttgagaaggaggtgtctgacttatgtaaggcccacagattggttcgaccaggtgtgatgtttacatggtgcgtggggaaggctggttgccccaccctaatcttatcatgcaaatggctttctgcttggtcagtgccatcttgtctgcctcttactgtacatgtggctggcaaagagaagagaagacggagctgccattttgagcatgcctattcccgagtagtttcttcctattggcacaactgccagcattcacctgtgcaaacttctagcttttttgtctatgtctgccactcgattttacaggctgctctttgctagagaagaaaatgatttgggggctgcttttcattaagaggaagaccttaccgaggacccccatatctccctatctgcctaagtaatttcttcttaactcctatatcaataccaagctttcctgtaaaatccctatggtaagattttaaaatttaagatgatgtttaagactatagtctcccatcttcccagtctgctggctctctgattaaacctgcttttccttcctccaatccttgtctcttgagtctggctttcaaatgatgagcagccaaacctgggttcgtttacacaagtcctgaaccacatgactgtttccctaacacacatagcatcttcccgctttcctcagatttctattcttccagttccaaacccaggccacgcttggtttatcgatggcagtgcttctaaacccaatcaattttcaccagctaaagctggatatgatgtcgtgtcccacatctttattatcgaagctgctgcacttcctccctccaccacttcccaacaagccaaactaattgctttaactcgtgcgctctctcttgctaacagaatgcacattaacatttacacggactccaatatgctttccacatcctccataaccatgctgccctctgggctgaaagaggcttctttaccacacaaggctcttccatgatcaatgcctccctaataaaggccctccttaaggctgctctcccgccggccatggctggagtcattcattgtaaaggacaccagaaacctactgatcttattgcaaaaggaaatgcctatgtcgacaggacagcaaaagaaatagccaatgcctccacatctgccaatattccagcccccgctccagagggccagtatttttctttctcctctatcactcccacctactcttcttctggaaacctgctctaccagtcttttccaactcagggcaagtggttcttaaatcatggaaaattcattcttcctgcctcacaagctcagttcattctttctttccttcatgaccacctccatgtgggatacaagtctctggctcgcctcctacagcccctcatctccttccctctgtggaaatccatccttaagaccatcacctctcaatgctctgtctgccatgccaccagcccccaaggctttctcaggcctcctccttttcctatgcatcaggctcgtggatttactccgacacaagattggcaaattgacttttctcatatgccccatgtccgtaaatttaaatatctcctggtttgggtcgataccttcaccggatgagttgaggcttttcccactagctccgaaaagggtactgccatcatctcttcccttctaacagatataattccccgatttggcctccctgcttctattcaatctgacaatggtcccgcctttattagtcaaatcacccaagcagtttctcaggctcttggtattcagtggaaacttcataccccttaccgtcctcaatcttcaggaaaggtagaacagacgaatggtcttttaaaaacacacctcaccaagctcagcctccaacttaagtacttctaccacttgccctcctcagaattagggcctgtcctcgagaggccacagggtacagtccatttgaacttttatatggacgcactttcttgctgggccccaacctcatcctagacaccagccctctaggcggctatcttccagtcctccagcaggctagacaggaaattcaccgggctgctaatcttctcttgcctactccagattcctagccatatgaagatacctcttttagtacatcctctcatcttttcactttacatttccagttttgccttacacaaggtctctttttccttcgtggcttctccacctacatgtgtttagctgttaattggacaggcacatgtacactagttttccttactcccaaaaatcaatttgcatatgggaccgaacagcttcctgttcccctcatgacaccaacatttcactgctgttttgtttttcttactattaatataagaagacaggaataggcctgaacttgctcactgctgaaaaaggaagactctgcatatttttaaatgaagactgttgtttttacctaaatctatctggcctggtatatgacaacataaaaacactcaaggacagagcccagaaactcgccagtcaagcaaataattatgctgaaccactttgggcactctctagttggatatcctgggtcctcccttagtccttaaatacctgtttttctccttcccttattcagaccttgtatcttccgtttagtttctcaattcctacaaaaccacacccaggccatcagcaatcattctatatgacaaatgctccttccaacaaccccacaatatcatcccttaccccaaaatctttcttcagtttaatctctcccactctaggttcccacgccacccctaatcccactcgaagcagccctgagaaacattgcccattatctctccataccacccccccaaaaactttttgccaccccaacacttcaccactattttgttttgtttttcctattaatataagaagacagtaatgtcaggcctctgagctgaagctaagccatcataacccctgtgacctgcacgtatacattcagatggcctggagcaactcaagaaccacaaaagaggacatttcactattgtgatttgttcctgccccaccccaactaatcaatcaatcaaccttgtgacattccttctcctggacaatgagtctcatgatctccccaccgcaccttgtgaccccgcccctgcccccaagagataaccacctttaactgtaattttccactacctacccaaatcctataaaactgccccaccccatctccctttgctgacactctttttggactcagtccacttgcacccaagggaaataagcagcctcgttgctcacacaaagcctgttggtggactctcttcacatgggtgtgtgtgacaggatagtcctattctaccctccttgcaatagtctttttgaataaagtcttcccttgctaaattcagatttgttttttatttgacagagtaatggtcggtgcacataaaagactaagcatgcacaaaagtgtgcacacaaagataaaggctgggtgtgtgcacttgaggaggctgtgctcagtgtatgtgtgtgtgtgtgtgtttatgggtactggtggtaggtggtttttgagttgcatatgcatctgagagtccagatagtctctgaatgtaaagaaagcttggtcttgtctgggcttgtctgggcttgccccctgagcggatgagacacaccccgtctcagcctatttgaataacggcaaagtgttaagccaattctcagggaggaaacaatcttgcaaatacaatatcatcttggggctggaggagagaagaatctgccacaggtctgccagtggaagtgtttgccttctctgggtcttgtgtggtcccatcagagaaccagggtatataagacagacaccagagaacagcttcactaagaccagaagaccccagcaccctcttccagaatgccctgggtcttgcatggcccccatggggaaaccagggtatatatgagaaagacgtcagagaacagtttcactaagactggaagagcttacttccctcttccagaatgcagtatttggagcaggagaatctgctctttaatagctttcagctacacaggtttcagttcctcaaaggctgcacttctgacgttgagaagtcagaacatagtaatatctgcatgaacattgcagcattactatttttttttaaattttactttaagttctgggatacatgtgtagaatgtgcagacttgttccataagtatacatgtgccatggtggtttgctgcacctatcaacccatcatctaggttttaagccccacatgcattaggtatttgtcctaatgctctccctccccttgccccccaacccctgacaggccccggtgtgtgatgttcctttccctgtgtccatgtattctcattgttcaacccccacttatgagtgagaacacgcggtgtttggttttctgttcctgtgttagtttgctgagaatgatggcttggcttccagcttcatccatgtccctacaaaggacatgaactcattctcttttatggctgcatagtattccatggtgtatatgtgccacattttctttgtccagtctgtcactgatgggcatttgggttggttccaagtctttgctattgtgaatagtgccattgcagaattatttataatagccaagacatgaaaacaacataagtgtccattaatgaaagaatagataaagaaagtatggtctacagacacattggaatactatttcatcttacaagagaagaaaatcctgacatttgggacaatatggatgaacctggaggacattaggctaagtgaaataagccagacacagaaaggcaaatactgcgtgatcttacttatacgtgtaagagttaaagaaagagaaaagaaacacgaaaaggggctcaacagtcaaagacgggtttattttggagaataaacctgagaggggcttctggccaattttggtcaagagtgctctctcttacagattaaaagtatatattggttttagggtgagggggcttatcacaagcttggaatgtttctgtgtggaggagaggtttatggcggggggttggaatgtctctggtcacaggggaggttatcttggggctgacatcttcccagccagaaaggaggttatcttggggctggaatgtctgtggttgaggatgttatttgtggtttatggtcatagtgaccttagccattaggctgatgccatttggatttaggcagttttttgatcaagatgaaacttttttttttttttttttttgggatggactctctctttgttgcccaggctggatgcagtggtgtgatctcagctcactgcaacctctgcctcccgggttcatgccattctcctgcctcagcctcctgagtagctgggactacaggcacccgccaccacgcctggctaatttttttgtatttttagtagagacggggtttcaccatgttagccaggctggtctcaatctcctgacctcatgatccgcccaccttggcctcccaaagtgctgggattataggtgtgagccaccccgcccagctctgatcaagatgaaacttaaaatggcagcacttgtccaagatggtgatactcctgttctgtcaatatggggaatctttaaaaaaaaaaacaaagccaaactcttagacagagagtagaactgtggttaccagggaataggggtaggaggaaatgagcagatattggggcacaaatatgtgggctctctggaggcttgcgagctattaaggagtgggtttaccccaaattggaaaatgtgggctctgcgttcaaatagcctcacttgggtcttagggctggtaaggtttgctggaaatttgcatgtgcattgtacatacacacaccagcatgatatttaaatcagtattatgagaattttaaagagatacagttttcctatctcagcacaacagactcatgaagcatttaccatcacccttaaaaaagaccacacacaaagtgtggtcggttaattggtgaattacgtagattcatcaaaacaccagttcctcctttgtgcaggctaaatttatgacagtggacatctctggtctctatcctgttaatctggatgtccgagtttaatgctaaatttcaaaagatgaggctgggcacagcagctcatgcctgtaatcctagctctttgggaggccaaggtgggtgggtcacctgaggtcaggagttcaagaccagcctggccaacatggtgaaacccagtctttactaaaaatacaaaaaaaaaaaaaaaaaaaaaaatagccagacttgttgtgatcttggctcactgcgacctctgcttcctgggttcaagcgattctcctgcctcagcctcccaggtagcagggactacaggcgcctgccatcatgcctggctattttttttttttttgtattttagtagagatagggttttgccatataagccaggctggtcttgcccttattacccttctgaccaagccgaggcgggtgatccttcccctctctcagctgggacaggtgaatcacccgtcttggcctcccaaagtgctgggaacaagcatgagtcaccgctcgtggtcctgttaatggacattgaatttccttttgaggaggtggacaagatggtgattaactgttaacggactttgaattttcttttttctttcttttctctctctctctcttttttttttttttggagatggagtctcgctttgttgcctaggctggagtgcagtggtgtgatgatcttgggtcactgcaacctctgcctcccaggttcaagcaattctcctgcctcagactcctgagcagctgggaccacaggtgcccaccaccacgcctggctaatttttttctatttttatagacatggggcttcaccacgttggccaggctggtctcaaactcctgacctcagctgattcacctgctttggcctcccaaagtgctgggattacaggtgtgagccactgcgcctggccttgtattttcttttctataaaaccctgtgtatacactcttttttcaaaaattgaggtgaaaatcatgtaacatcaaataatccttccttccttcttccctccttccctccttctctctctctctttgtctctttctttcttttttttctttatattcctttgtcaccctaggtggagtgccacatgaacatagctcactgcagactcctggattctagcctcctgcctcagccttcctgttaatggacattgaatttctttttctttctctcttttttttttttttggaaatggagtctcactctgttgcccaagctggagtgcagtggcacgatcttggctcactgcaacctctgcctcccaggttcaagcgattctcctgcctcagcctcccgagtaggtgggattacaggcaggcgtggtggtggatgcctgtaatcccagctactcgagaggctgaggcaggagaatcacttgaactcgggaggtggaggttgcagtgagctgagaccgtgccactgcattccagcctgggtgacaagagcgaaactccatctcaaaaaacaaacaaagaaacaaaaaatcaaaacaaacaaagaaaaaagaaaatagaactgattcaaatgacggttaagcacctgaagaaaagttctggactggtagaaacacaaggaaaccctcaaagactgtatatctaaaaaattctattttatattcctgtgaacagttttaatcctatgtggtagattaatgtaagttagtttatacaatacatatttttcctttttgactggcttatttcattgagtataatgtcctcaaactagtcatgccttcctaactatcccccaaagtcttaactcatttcagcattaactcaaaagtccacagtccaaaatctcatctgagacaaggcacgtcccttctgtgagcctgtaaaatcaaaagcaagttagttacttcctatatacaatggggtacaggcgttggatatacccattccaaatgggagaaactggacaaacgaaggggctgaaggtcccctgcaattccaaaatccagtggggcagttaaatcttttttttttttttgagacagagtgtcgctctgtcacccagtctggagtacagtggctcgatctcggctcactgcaacctctgcctcccgggttaaagcgattctcctgcatcagcctccaagtcgcggggactacaggcgcacgctgccacgcctggctaatttttttttttttgtattttagtagaaacggggtttcaccatattgcccaggctggtctcgaactcttcagctcaggcaatctgctcgcctcggcctcccaaagtgttaggattataggcatgagccactgtgcctggccaggcagtcaaatctttttttttttttttttttaattatactttaagttctagggtacatgtgcacaacgtgcagatttgttacatatgtatatatgtgccgtgttggtttactgcacccattaatttgtcatttacattaggtatttctcctaatgctatccctccccccctcccccgactccacactccacgacaggccccggtgtgtgatgttctcctccctgtgtccaagtattctcattgttcaatttccacctatgagtgagaacatgcggtgtttggttttctgtccttgcaatagtttgctcagaatgatggtttccagcttcatccatgtccctatgaaggacatgaactcatccgtttttatggctgcatagtattccatggtgtatatgtgccacattttcttaatccagtctatcattgatggacatttgggttggttccaagtctttgctattgtgaatagtcaggcagtccaatcttaaagctgccagataatctcctttgactctgtgtctcacatccaggtcacgctgatgtaagtggtgggttcccatggtcttgggcagccccttccctgtggctttgcaggatacagcctccctcccggctgctttcacaggctggcgtcgagtgtctgtggcttttccagatgcatggttctgagtccaggtaaggttggagaggggctgcagggctagatttgtgagggcgggtggcgcatgggtctcattttccctccctcagctgggacaccccaccactcctctcacttccccttctagaagtgagatcatggatgcaagatgcgggattatctggcttggaatcctgagtccactactatgtagatgaattgcctcgggcttgtgactcaggttttctgccactattttcctcaactgttaaatactgaggttccagctgttacaaaaccagtaactttggacagatgactcaacggtttacgcctctgttttcctcatctgtgaaatgggaacaatgatgattcctccagctttgtagggcttgcatgaacacgagctgagttaatgggataaaacagtgtgcagtccatattaaatgccgtaagaagcacttgactttgagtccccagttccaaaatccaaaaagccctggaaatcaagttgttttggtgaattgtttggcagcaatctctgacctgaactaactttttgttaattgtagtcttttttttttttttttttttttttaaagacagtctcactctgccacccaggctggagtgcagtggcactatctcagctcactgcaatctccacctcctgagttcaagagagtctcctgtctcagcctccctagtagcatggattagaggtgcccatcaccacacccagctaatttttaaatgtttagtagagatgaggtttcaccatgttagccagattggtaactgtggtcttgattttttttttttttttttttgagatggagtttcgctcttgtcacccaggctggagtgcaatgacatgatcttggctcactgcaacctccacctccggggtttaagtgaccctcctgcctcaccctcctgagtagctgggtttacaggtgccggccaccatgcctggctaatttttgtgtttttagtagagacggggttttaccacgtcggccaggctggtctcaaactcctgacctcaggcgatccgcccacctcggcctcccaaagtgctgggactacaggcatgagccaccgcgcctggcctgtagtcttgatttttatcccacttagtgtgaatgttaacacttctcattgtaaaaaaaaaaaaaaaagatgtggtgtttgattacaaaatgctgtcccgacctcactgaggtgatgcataaaagatggtataagcgctaggcgcggtggctcacaactgtagtcccagcactttgggaggccgaggcgggtggatcacaaggtcaagagatcgagaccatcctggccaacatggtgaagcccgtctctactaataatagaaaaattagccggacgtggtggcggatttctgtagtcccagacttgggaggctgaggcagaagaattgcttgaacctgggagggtggaggttgcagtgagctgagattatgccactgcactccagcctggacaacagggcgagactccatctcaaaaaaaaagatggtataatcctgtacaccatctttaaatactggtaaattctgagttccaaaatgtatttgaggtccaggcagtggctcatgcctgtaatcccagcacttggggagaccgaggcgggaagatcggcatttcgggagattggagtttgagaccagctggggcaatgtaatgagacctcatctcaaaaaaaaaaaaaaaaaaatagccgggtgtggtggcctgtgctggcggtcctagctatttgggaggctgaggtgggaggatcgcttgagcccaggagtttgaggccgcagtgagacaggatcatgccaccgcactgcagcctgggcgacagatcaagaccctgtattttcagtagaggtgaggtttcgccatgttggccaggcttgtcttgaactcctgacctcaagtgatcttttattattattatttaagttctggggtacatgtgcaggatgtgtagttccattacatagttaaatgtgtgccatggtggtttgcgacacccctcaccaggctgcagtgcaatgacgcgatcttggctccctgaaacttccgcctcccaggttcaagagattctcctgcctcagcctcctgagtagctgggattacaggcgccctggaccacgcttggctaatttttgtatttttagtagacggagttttacatgttggccaggctggtctcgaactcctgatttcaagtgatccacccaccctggcctcccaactcattaggtattttgcattgtctgctttgagagacagtcacccaaagtgatctttgtgtttcctctcttgtcaaatagatgcaccaaggagaaaacagaactttttttttttttttttgacaaggaatctcactcttgctcaggctggagtgcagtggcatgatcacggctcactgcagcctttgacctcctgggctctacccaatctcccacttcagcctttggagtagcttggactagcacaccactacatctggttaatttttgtattttttgtagagatgggggtctcactatgttgcccaggctggtcttgaactcctaggctcaagcgatctgccttcctcagcctcccaaagtgctgggattacaggcatgagccactgtgcccagcccacttcctctattcttcaaacatccctaaccaagaacattttttttttcctgagacagagtcttgctctgttgcccaggttggagtgcagtggcgcaatctcggctcactgcaacctccacctcctcggttcaagcgattctcctgcctcagtcggccgagtagctgggattacagatgcacgccacgaagcccagctgatttttgtattttttaataggaaaatgaaagaaaaagctcaatgccttctcttgtcctgccaccactaccccccaccacactcccaccccaaccccgggtggcccctgtgtgtacactttttctcttgaacttaaataaaataaaataaaatttaaaaaaccctaatcagcagcagtggtcaggggcgcacccactgcactccaaagaaggtctcatcagtgtttcgggaaggcaaaagtgtcccagtgaggttggtgcagagtgtgtcccctcgggccaggggcgtcaggcgctgggaggcaatggtacaaccttggtggaagctgagacgcagcaggctgatgctacgggaggcgggagagcagattcccacggccagggtggtggggtggtgcctggaggccgtcgtggaggagcagatggccagcgtcacctggatgtgtaccatgtagatgccatcacgatggatacgtagctgccccttgtccagctctggtccatgcaggaaggagcggcccagtgctgggcccccctgccagtatagcctggggtcctgctgaggtcctgggggcacagggttagagggatgagaggatggaggtttagggaaactgaggcacagggggtcatagagaaagtcagatatagagatcgagagttagagatcaaggaataggttggacgtggtggctcatgcctgaaatcctaacagtttaggaggccaaggcgggtggatcacctgaggtcagcagttcaagaccagcctggacaacagggcgagaccccatctctacaaaaaataaaaagtcagccaggtgtggtggtgcacgcctctggtcctggctactcttgggaggctgaggctggaggatcgcttgagcctgggaggctgagactgcagtgagctatgatcacaccactgcactccagccttggtcacagaaaccctgtctcaaaaaaaagggagggggatagaaggttagagatctaaagggaaggagagaggggtaaggggaaaggggtagagacagggagagagagacaccaggagagagagagacaaaaaaaaaaaaaaaaaaaacagaaacagacaagggtaaagatagagggggagggagagatatatagagagagaatgcagagagagagcaagagagagagtgtatgtgtgagagaggacgagagtgcacgagagagtgcgacagagagcatgagagagagagcatgagagagcgagagagtgtgtgagaggacgagagagcttgagggagagtgcacgagagagtgcgagagagcacgagagagcaggagagagtgcaagagacagcatgagagagagagagatcatgagggagagagagcatgagacagcgagagagtgtgagagagaggacgagagagcttgagggagagtgcacgagagagtgagagagagcacgagagagcaggagagagtacgagagacagcatgagagagagagcaagagagagagtgtgtgtgtgagagaggacgagagagcttgagagagagtgcacgagacagagtgtgagagtgagctcgagagagtgcatgggagagtgtgtgtgtgagagaggatgagagctacagagctcgagagtgcacgggagtgagcgagagagtgcctgagagagtgagacagacagcacgagagagacagcgtgcgcacgagacagcgcgcaagagagtgcacgagagaattccccaagggacgcctgctcgggtcacaccctgaacgccaataaaagctttggctcccaggaccctttttttttcttgctttccacccgctggttgagtgtgtgtctcagagagctcccctaccttcccgttggccctcttctctctaggatctttattttctttagagacagggtctggtcctgtcacccaggctggagtgcagtggtgcaatcatagctcactgcagcctcagcctctggggctcaagctatctcccacctcagcctcccgagtcactgggaggtggcatgcgccaccatgaccagctaattttcaaaattttgttctagagatggtggtcttgctatgtttcccaagaaacatagtctagaactcctgggctcaagcgatcctcccacctcagcctcccaaagcgctgggatcacagccgggagccaaggtcctcggctatatttcacgtgtttcatctcagcgtctcctgtctccgcaacttatctgactgacacacctgagcctcactctcctcctcactcaaggctctcctggagactggctatcttgttaggaaggaactgaacggggtcaaacaggagccccaagggtgtttaccaggctttgcaaatttcctgtaagagtgacacctggtcccctgtcacacacttaggcatgatatcatccaccagaagaaagagctgtcctgtgaaagacactgtcaacacctgtggccaccacccctggtgccccatcgatgtggggctggacagccactctccagaaaggggcctcaagaccaaattacaggaaaaatatggcaaaggccggggagggggggaagatatatcaggggtcagagacccaaggagaagagagagcaacaaaggtcccttccattacaaaatggaaggaacaaaacacgcaagcgtgcagtaattttagtctctggggatgaaccgtggaaaaacagaagaggaagaagcgttcgagagaggctgggaggaggtagagacttccacctagagcagaactgttcatttcttctccctcaaggcttcttgccaatgccacccactcagataccacccccccacccgaccgccgcgactccactttaaatgaaaatccccaaccctggcatgcccggattccccacccacctccttgcctgattttttctctaaaacctgctcttggcctgttttactctacgtggcattgctctgtttttcacatgttcgtttttatttttttggtcatctcctcctcggtaggagtgatagtagaagggaagctcaccaggcagggatttctgtctgttttgtgcgcgactgcagtaccggaacagtgcctgcccactgcagatgtataattagtgcttgtagcatgaatggaggaagggtagcctttcctgtgagcgttttcgtttactaacaaaacccctttgattcttccaagggaggagatcgaatgtgaaggactgagagggaaagggagagaaaggtagtggatgcccagaaacacaaacctgctcgctctctctctcctctctctctctctcgttctctcccttttcctttttctcttgggaatgatctctttctcccccgccctgtttttcttcttccccctctctgtctctgtctcttcctctctgttattctccttctcttttcctctctctggctttctttcttttctttctcttatttctttttttctctttcttctttctttttcctttctctctctctcacctccctccctctctccttccttccttcttctctttcttttccttccttcctttctttctttttcttttcctttcttctttttatttatttatttgacagaatctccctctgtcacccaggctggagagcagtgccattatcttggctcactgcaacttctgcctcccaggttcaggcgattctcctgcctcggcctcctgagtagctgggattacaggtgcctgccaccacacccggctaatttttgtaattttagtagagacggggtttcaccatgttggccaggctggtctcaaactcctgggctcaagtgatccacccgccgcgccctccgaaagcgctgggattacaggctccagcaaccacgccaggtcgcctctctcgtttttattctctcttcctctatctgtcttttttctctttctccgtctctctccctctctctcgttctgtctcccccgcctgtctccctccctccctcttccactctccctgcgtctctccctgtttctttctttccccttcttctcctgtcccgtctgtcccctctgtccctctctctgttcttttttctgtctctccctccctttctctgggcctctccctccctctctgtcttctctctgtctccccctctccgtttccctccctatctctccctccctctctccctccgtctctgtctgtgtctctttctctctgtctctccccacttgtctttctacctctccttccttctctctctgtgcctcttcttctccccgtccctccacgtcccccgtgttacctgtgtgattcagctgcagctcagctacgtcccactggaagaaaagaccagaaaacagggcacggacgtaagcagagaggttctatgtgtcccctgtgccaggagctctcttttctctgtccatcctcctttccacctctcatcccacggcgcgcactggtgattttatttcattttatttttttttactcttaagacttcttaaagaggaagcaggtctgaaccagcggggaacgtgaagtcgagaccttcaaaagaacttcttcgtttcccgaatcgttttcctggatgtcactgggcgcgagagcaccgcgcgcagcggactctctacgctgcaaaggcgcccggcgcggtccccaaagggacccctcccccacccggagcgagtggctggggccatcccgtcctaggaggccccaggaagcccccacgcccagccttgtgaagcccccagcagcctctgagtcagcctgccgggggaacaccagagccgagtcatcttccatttccatgtgtgcctacctttcccatcccgggatctccctgtacctcctggcagggctgcctgtctcgtagcccctacaccgggcagcctggtccccgcctcgcctccctgttctggtctctgtctctgccctaccagatcttcctctctggcctctttgtacccatctcattctgtcttttcggtcacgcgcctctctatgttttcttcccaacttttccatctcaactcaccccaagtgactcgagcggcagctgctgctgagcctgtgcgaagcgctggatgcacaccacgaggcagatcaccaagcccgcgaccaatgggaccaaagcagcccgcaggacgcacccatagggcctgcgccgcaccgagcagcccgaaccctcctccggcatcgccgcggcgatcacctccgctagcgcaggaggggcgatgggggcgcggagcgctgccgagaaggaaggaaggaaactgcagccccctcccggggctcctgggcgtctacttgcttcaacctgtcaggggaccagcctgcccctctctggggatgtccggccggtcgaggggagggacttgagcaattggcgaggggaaattccctccaaccgctgccagtctgaagatcctaaagtgggtggaggcagttgccaggatgcaggcagtggccccgggtgagcctcagagttgcctgcccccaacccctccccgcccgaccttcaggcaggagacattcaatcttcctattcccctctccacctcattcttctggggcccattcatttattcaacaaacctccactgcacatttattagggattagattgtgctgtgcactggggatacagcagacatccaagaattgggggtgctccccaaatattcgtgtacccctctcctgcatttttttgatttgttttgtttttgagacggaggtctccctctgtcacccaggctggagtgcagtggcgccatctcagctcgccgcaacctcgatctcctgggttcaagcgattctcctgtctgagcctcgcgagtagctgggagtaacatgcgcgcgccaccatgcctggctaattttttgtatttttagtagagatggggtttcaccatgttggccaggctggacttgaactcctgaccttgggtgatccacccgccttggccttccaaagtgctgggattaaaggcatgagacactgcacccggtcagttatctcctgcattcttggagaccacctgcttttttgtttaaagttaaattaagttaatatttttattttttatttttattttattttattatttattttttttttttttgagacagagtctcgctctgtcgcccaggctggagtgcagtggcgccatctcggctcactgcaagctccgcctcccgggttcacgccattctcctgcctcagcctctcaagtagctgggactacaggcgcccgccaccacgcccggctaactttttgtatttttagtagagatgggttttcaccatgttagcgaggatggtctccatctcctgacctcgtgatctgcccgccttggcctcccaaagtgctgggattacaggcgtgagccgccgcgcccggcctaaattaatatttttagagacagagtgttgctctgttgcccaggctggatgcagtggcgccacacagctcacagcagcctcaaactcctgggcttcagtgaccctcccatctcagccttttgcatagttgggtctaccagcacacgctaccatgcccggctaattttttttttggggggggtagaggatagggtgttactatgttaccaggctggtctcaaacatctgggctcaagcgatcctgctgcgtaggtcccccaaagtgccgggatgacaggtgtgagccaccgcatccagcctcctgctgctgttctcgatggctgtagtgggttaacggtgtcctcccagaattcatggcctcctggaactgcagaatatgacctcattttgaaattacggggttttttttgcagatataattaggcttaaatgaggtcatactggattagagtgggccctcaggtggagagaaaagaggctcatagagaaggagccgtgtgaaaacagaaacagaaactgaatgaggcagatgaaagtcaagaaacaccaagaaggagccaggcgcagtggctcacgcctgtaatcccagcactttgggaggctgaggcaggcggatcacttgatatcaggagtttgagaccctcctggctaacacggtgaaacccccgtctctactaaaaatacaaaaaattagccgggcatggtggcgggcgcctgtagtcccagctactcaggaggctgaggcaggagaatggcgtgaacccgggaggtggagcttgcagtgagccgagatcacgccactgaactccagcctgggtgacagagtgagactccgtctcaaaaaaaaaaaaaaaagagttggagaccagcctggccaacatggtggaaccccatctctactaaaaattcaaaaaatagctgggtgtggtggtgggcacctttaatcccagctactcaggaagctgaggcaggagaatcgctcaaacccgggaggcagaggttgcagtgagccgagatcacaccattgcactccagcctgggtgacagagcgagactctgtcttaaaaatatatatattttttaaaaagaggatccagcctctttttccggctggaaccatggagggtgtagaagagaagaagaaggaagttcccgctgtgccagaaacccctaagaaaaagcgaaggaatttcacagagctgaagaccaagcgcctgagaaagaagtttgcccaaaagatgcttcgaaaggcaaggaggaagcttatctatgaaaaattgaagcactatcacaaggaatataggcagaggtacagaactgaaattcgaatggaaaagatgtcaagaaaagctggcaacttctatgaacctgcagaatccagactggcgtttgtcatcaggatcagaggtatcgatggtgtgagcccaaaggtccgaaatgtgttgcagcttctttgcctttgtcaaatcttcaatggaacctttgtgaaggccaattaacatgctgaggattgtagagccatacattgcatgcgggtacctaaatctgaagtcagtaaataaactaatctacaagcgtggttatggcaaaatcaataagaaacgaattgctttgacagataacgctttgcacgatctcttggaaaatatggcatcatctgtatggaggatgtgattcatgaggtccatactgttggaaaacgcttcaaagaagcacataacttcctgtggtccttcaaagtatcttctccatgaggcagaatgaagaaacagaccacccatttcgtggaaggtggagatgctggcaacagggaggaccagatcaacaggcttgttagaagaatgaactatggtgtgtactataattatttttctaagctgttcaataaacattacctgctctcaaatggaaagaaaaatatgtctgtatatacatacagttagggtcccaagggcctctggctatgaatcatcaagaagtcagtgtcatcagcagcaaactcacagccaacagcgctagaactcgtgcctggggatagcttctctaacacgtggatttcctcctctgtgaggctcatcacggcctccttgctcttgggggacattagacagggcttcagcactatttgggggctgtttgaaacagcaaaattaccaacaaaaagcaaaaaattgaaaggagataaaaatgggagatttcagagcctgagcctatagcatttgctgggtgggtgaagagggtggtcaaagaggtccagaattttgaggtatccagaaatcaaaatatcctccctgagatccccaagtactaaagggatttccttcacggaagccctaggactccaggtctgggggaagcgggtagacagcaccttcaagacaatctcctaccttaatttatttaatatttacttagctgatctttttatcagcttaagatataaatagtttagattcatatcattaagaaataactaataccttctaaaagatgggggaaagagagatggggtggggtggctcatacatgtaatctcagcactttgggaggccgaggtgtcttaggaaaatcccaaaatgagacaggagcagccaactcataaaaataaatacaactgcttggccgggcgcagtggctcacacctgtaatctcagcactttgggaggccgaggcgggcggatcacaaggtcaggagttcaagcccagcctggccaatatggtgaaaccccgtctctactaaaaatacaaaaattagctgggcgtggtggcggacacctgtagtcccagctatctcgggaggctgagtcaggagaatcgcctgaacccgggaggcggaggttgtcgtgagctgagatctggccactgcactccagcctgagagacagagagagagtctgtcttaaaaaaataaataaataaaaaaaatacaactgcttatgaaactgaatctcgttcaccacaagaaaattggaaattgaaagctccgtgaaacacaatttttctttctctctctctctctctttttttttttaagatcgtgtctccctctgtcgcccagcttggagtgcagtggcgccatctcggctcactgcaatctccgcctcccaggttcaagcaattctcctgcctcatcctcctgagtagctgggattacaggtgcccaccaccacgcctggctaatttttgtatttttagtagagatggggtttcaccatgttggccaggctggtcttgaactcctgacctccagtgatctgcccacctgggcctcccaaagtgctgggattacaggtgtgagccactgtgcccagccacactttatcttgtcacctgtgatttggtaaaagatcagagtgtttgatgattcactgctcagcaagtgcgtgggtgagaaggagcctcaaacctggaggctaggagctgaaatggatccaactttctggaaggacagcttgttgaaatctatcaatgcaccaaaatgcaccttccctttggtccagaaattttacttcaaggatattctttcgtaagcacacttgcacgcgtcacagacgcggacgtacgcacacaaactcaacgtggtgtggtttgaatgataccggaacacaaccaaccagaagacccatgcgcaattgagggtttagtcctgtgctaagcacttgtcaggtttcaccttttctgaccttcccaagaaccctatgaagtgaatcatgctgttatttctattttccctgtgagcaggctcagagaggaaggccaccagcttaatccacctagcaaggagcttgggagaggaagtgcctagatttgaatgtggatccatatcgtgtacctgaagaacctggaccttcccacctgagtcacttagtgacttgacctggcctctgaccactttccagtctgtgcagttctgctggaggtcatttgcaccattttttattttttaatttttatttatttatttatttatttttgggacgcctttctctgtcacccaggctggagggcagtggcgtgatctcggctctctctgcaacctctgcctcccgggtttaagtgattctcctcctgcctcagcctctcaagtagctgggattacagatgtgcaccaccacatccggctaatatttgtatttttagtagagatggggttttgctatgttggccaggctggtttcgaactcctgacctcaagtgattcgccaactttggcctcccaaagttctgggattacaggcatgagccaccacgccccacggtcgtgtgcattatttttgagaagaaggttttctaaaaccagagtttccccatctgcagactctagagctgaggctccaggacaagacgtccactgatgttggcactctctctctctctctctcttgctctaagtcaggggaatcatgagccctgtgaagggaaagagttgaggggagagacccagaggacagttggagcacagaaagtaagatcactttcctcctgaggaagcccgaggcccaccaggctgatttttggctgccttctgctttcccccaagggaaatctggaaacttctgcctctcttccataaccctggaagccgcgggcagcttgaaagtgccaactcaggcttcctctttgtccaacttggtcactccttctgtttccctttgctgtggctgatctcaagttgccacagggatatgccccttggtgttgatataggaattaaaaaggaattactggctgggtgcagtggttcacgcctgtaatcccggcactttgggatgccgaggtgggcagatcacctgaggtcgagagtctgagagcagcctgaccaacaaggagaaaccctgttaagggaggagaccacccctcatattgtcttatgcccagtttctgcctccaaagaaagaaaaagtaaaaacaaaaaggcagaaaggaaatccacaagcagaaagcccagcacctcaccctgggcctggtagttaaagatcgacccctgacctaatcggttacgttatctatagattacagacattgtagagaaaagcactgtgaaatccctatcctgttttgttccgatctaattaccggtgcatgcagtccccagtcacgtacccgctgctcgctcaatcgatcacgaccctctcacgctcacccccttagaggtgtgagcccttaaaaaggacaggaattgctcacttgaggagctcggctcttgagacaggagtcttgctgatgctcctggccgaataaaccccttccttctttaactcggtgtctgaggagttttgtctgcggctcgtcctgctacatttcttggttccctgaccgggaagcgaggtgattggcagagggtcgaggcagctccttaggcacttaagcccgccctgtggaacatccctgcaggggactccgaccagcccgagtggcgcggatcctgagagtgcttccgggtaggcatttgcgccggtgggacgcctcgccagagcagtgtgtggcaggcccccgtggaggatcaacgcggtggctgaacgccgggaaggaacgggcacttggagtctggacatctaaaacttggtaagactagtctttgaaacttgcccactccgtttgagtggaagcgtggcctgatcacccacggcatgcctgtaccggcactttggttttggttttgacttggtttgaattgcttgacaggattggtctcaggaacttgcccactccatttgagtggaagcgtggcctgatcacccacggcgtgcctgtactggcactttggttattgtttttgacttgacttggattgcttgatactttggttttggttttgacgtggcttggatatctggatactccgattttggttttgattttggtttggtgcaaactgcaaaagtgtgtgtgtgtgtaccctttttacccgttctttgttttgtggtgtgcgtgtggtgtgagcgtggtgttttgtctcgaagaagcataggtcaggcaccaataagcccaccctactaggaactaggttgaaaattttcaaaaaaacatttaaaggagactatggagtactatgacaccaggaaaacttaaaactttgtgtaagatagactggccagcattagaggtaagttggccattagaaggaagcctggagaggtcctctgtttcgaaggtatggcacaaggtaatctgtaagccagggcacccagaccagctcccatacatagacacttggttacagctggttttagacctcccgcccccaacacacagtggttgagagaacagtagcataagtggctggcagaggcaaggaaagaccagcagagagagagaaaggaaagagacagagaggaagagacagacaaagagggagtcaaggagagagagagaaagaaaaaaaaagagagagaaagagagaggcagagagagagagaaagagacagaggcaaaaggaaagtcaaagagagagtgacaaagtcaaagagagaaagaaagaagatgatttaacattaaccactgaaaattccattcactcagcaggtttcctaacaggggatctaaatcttaattaccaaatacgaacgtctgaccagacgtaggaggaactcccttcaggacagcatgaatgatggttcctcccgggtaattaaaaaaaaaaaaaaaaagccatctataccaattctaatttagagaaaacaaggtcttatcaatagcaaaggataattaaaatcccgacttacaaggttttcaacaaaagtaaagtttgctaaaagttaacagtttaacatgtatgacagtaacttctatgcttctggccttagacagtctagtccacagacataaaaaaaggttcgctttggaaaagaatggttatcatcttcgagaaaaaaaaaaggaaaaaaaaaggtggggcagaatttatataaaaagagtattatatggtaaattcttgtcttgaaataaattaactggttgtttaaagaaagaaatgtttgtagtaagtccgaaagttaaggcatgtcgaaaaattgcctgtaaaagttgtgaaagaaaaataagttataaaaatagtgttaaaaaaagaatttatgcaaaaaatgttgtataatttaaaagtaactaggcctcctgaatgtaaaactattgaaaaaaaaaacagtttatgtgcaaggtgtataagaaaagtaaaatatacctttagtaaaaggattataaggaggcataagagtgtacatttttacctacattaaaaagttaagttaaaaaaattattgttttgaagatttaagcaagttttaaaacgttaattgtaaagaaaattctgtgtgtaaacatattagctaaagttaaagaactatcacccagtttttctggacattaaagtaaaagcataacaggtttttcttaaaccaccaacctgctctttagcaaaaattataaaaggttgaaaagagtctataaaatcataccttatagtcaaacattaaaaattagataaatatgtctacaaggttttattaaaattaggtttaacattaataacacactaatataaaaataaaatttagcttatctggtataaaaatcatacaaaaagcattattaaacataaaatagtgtttagatttctttggtctaaaaactaataaaaataggtgctgaaggaaatttctcagtaaaaaggcactaaggactataaagtccactgccacagtccccacatttaaaacaaaaggtcaatttcttagaaattatatacttggtttatcttccactttcttttctctcaaaaagtaatatgaggggctgtcccctcccttaacagggtttctccttgttggtcaggctgctctcaaactcccgacctcaggtgatccgcccacctcggcctcccaaagtgatggtcttgtgtcatttaggccaattagataaaaaaaaaaaaaaaatgaaaaggatccagtccaccttcagaaaggaaaaaatggctcttcctgtactaaaggacaatgtaaccccttagagctagtactaaccaatccccttgatcctcgctggaaaaaagaggaacgtgtaaccctaaaaaattgataagagctagactggatcttcaagtaaatatcgtggtttgagaaaaagtgtataaatgctctcccgagccagtatttcaaaccttctatgataaactaaaagtgccagtaccagaaattccatgaaaaacaagaaatttgtttttgcaattagccgagcatgtgacccagtctctcaatgtcacttcatgttatatatgtggaagaactgtcacaggagatcaatggccataggaagcacgagaattagtacctacagacccagttcctgatgaattcccagctcaaaagaatcaccctgataatttctaggtcctaaaagcctcaattattggacaatatcgcatagctagagaaagaaaagaattcactcaccccgtaggacgatttagttgtctgagacagaaactgtataatggtaccacaaaaacagtcacttggtagagttcaaatcacacagagagaaatccacttagtaaaaaattcccaaagttgcaaaccgtgtagacatagccggagtcccaccgggactagacagccccgactagattatgctacgtatgtaggcatagagcttatgccaaattgcctaaccagtaggcaggcagttgtgttattagcactattaaactatctttcttcctactgcccataaaaacaggtgaactcctgggcttccctgtctatgcttccctcgaaaagagaagcatagctataagaaattgaaaaaatgataaatggcccccgagagaatcatacaatattatagtcctgctacttaggcacaagatggctcgtgaagatactggactcccatttacgtgatcaaccaaatcatatggttacaagctgtcttaaaaataatcaccaataaaaccggcacagccttgaccattctggcccagcaagaaactcagatgagaaatgctatctctcaaaatagattagctctcgactacttgctagcagctgaaggagaagtctgtaggaaatttaaccttactaattgctgcctacacatagataatcaagggcaagtagttgaagacacagttagagctatgacaaaactggcacatgtgcccgtgcaagtgtggcataaatttgatcctgaggccatgtttagaaaatagttcccagcgctaggaagatttaaaactcttacagtaagagttataatagtaataagaacctacttactgcttgcttgtttgctacctgtacttcttcaaatgataaaaagcgtcatcgctaacttagttcaccgaaatgcttcagcacaagtgtactatatgaatcattattgatctgtcttgcaagaagacacgggtagtaaaaatgaaagtgagaactccagtattgagcgagagtctcaaaagggggggataagggaggagaccacccctcatattgtcttatgcccaatatctgcctccaaagaaagaaaaagtaaaaacgaaaaggcagaaatgaaatccacaagcagacagcccggcgccacaccctgcagcccccagtcacgtaggccctgcttgctcaatcaatcatgaccgtctcacgctcacacccttagaggtgtgagcccttaaaaaggacagcaattgcatcctcgaggagctcagctcttgagacaggagtcttgccgatgcccccggccaaataaaccccttccttctttaactcggtgtctgaggagttttgtctgcagctcgtcctgctacactatctctctaaaaatacaaaattagctgggcgtggtggcacatgcctgtaatcccagctattcgggaggctgaggcaagagaatcgcatgaacctgggaggtggaggttgtggtgagccaagattgcaccattgcaatccagtctgggcaacaagagcgaaactccgtctcaaaaaaaaaaaaaaaaaaaaaaaagagagagagaaggaattacttaggcagagagcaagggcatgggagtcctcggtaaggcttttctttttaatgaaaagcagccccaaatcattttctaacaaacagcagcctgcaagctgggagcttgcctggatgaatgccagcgggaactaaggactagatatattgaagatggcggctctatcttcccttctctgccagccacgtgtgctgtaaaggagcagacaagatggcacagatcaactagaaagcctatttgcttaagaagggtaggctggggcagcggggtgctgtggctcacgcctgtaatccctgcactttggaggccgaggcgggtggatcacctgaggtcaggagttcgagaccagcctggccaatgatgaaatccaaataatagctgggcgttttagtgagcacctgtaatcccagctactcgggaggctgaggcaggagaatcgctcgaacccgggaggtggaggttgcagtgagccaaggtcacaccactgcattccagcctgggtgacaaagtgagactccatctcaaaacacacacacacagaattagggtggggcaaccagccttccctgcacactatgtagacgtcatatctaatcaaatcaatctgtgagccctgtgtaaaacagacaccgccttctctagcctgcctataaaatctgctgtggtctgctggctccccttttttcggatctctctctctctctctctcagctcctctctgctctcttttctttttttttctttgatatggagtcttgctctgtcactcaggctggagtgcagtggcctgatctcagctcactgcaacttccccctcttgggttcaagcaatcctcctgcctcagcctcccgagtagttgggattacaggcgtgcaccaccatgcccagctacttttttgtatttttaggagagatggggtttcgccatattggccaggctggtcttgaactcctgacctcaggtgatctgcctgcctcagcctgggtcccaaagtgctgggattacaggcgtgagccatcccacccggccctctctcctttcttctattaaactttccactcttaacccactcacttgtgcctgtgtcctgaattctttctctgcacacgtcaaagaaccccagggtatataacccagacagcgtagcgggttcagtgttacccttggcagagttctaacaggaaaaggacagggatccttcaacttacagcttcccgcttaactatatagcatgcctctcactgctgggatttctgctgggagggagggtatcaagacacttttgtctcagcacttctcactcttccattcctgttcctttctttctttttcttttcttttttttttttttgagacggagttttgctcttgttgcccaggctggagtgcaatgatgcaatctcggctcattgcagcctccgcctcccaggttcaagggattctcctgcttcagccccccagtagctgggattacaggcgcccaccaccatgaccagctaatttttgtatttttcgtagagacggggtttcaccatgttggccaggctggtctcgaactcttgatctcaggtgatccacccgcctcagcttcccaaagtgctgggattacaggcgtgaaccaccatgcccggctcattcctgttcctttctttatcccatgagccagcaggactaggagaattctgtgcaaaaggaagcaacaagaaacaattttcacctacatgaaagtctgggctggcatgtcatctctgttctgcaaaatctttaggagccaaaattctttcactgaagtgcctccgacacatcaaaggtgatgcccttgtctgcaaagtacaaagtgacacaccaccatggctgagttccaggaaacaggaaggtcaaaaagtgaagggaagcaactatccttccttttcaaggaagtgcttgcgctaataaattccgcttacaacccattggccaggactttgtcacatgactcaggcaagggagactgggaaatgtagtcttcattctgattagccatgtacccagctgaaactccagggttctattactatcagtaacagaattttgtgcctcaagtgcaaatttcaagggggcatctcaaactgtcattgtcaaaataaatgatattctcaggcaacattttaaaaaaaatctaaaaagtgaaggtcaaaaaaattcatgatgaacaaattgcaaagatgttttaaagatcagatccaaccctacacttctacaatctgcttcatttttttccaccttcattctggtcttgcagcccaaatttgcattctggctccaacacttaccagctgtgtgacctgcagcaagtgatttaacctctctgtgcctcagttccctggaagtaataaaagtatctcacaggcttgctatgaggttggaaggaattaatatttgtaaactgtttagcaaagagccagtacgtagtaaggaactggtgagaactattactatcattgctactactgaaacggcctccttgtctggagtaacacccgaggttcacagtctcacagccaaggaaaacaaggacatagacatagaaagagtgaggtcgagaatggaagtttcataggcgaaagaaagaggagagctctctgctgcagagaggggtcccggaaaaatgggttgccgtatcagcggggaaatgtagggggttttatagagaagctagtgagcaaacggtgtttgatttatatagggtgtgaaaaactggttagaccatgtgtcgcatttgcatagggtgcaaatttctggtagcctctgaccctaatcttttattatgcaggcaggttctctgcccgagctgcgccatgttgcccatttctgttactgcacgcgtggtaacataaaagggaagaggaagcgtccatgtagggcctgcctggcccctgggtagctctcttctattggcgcacctgccggcattctcccgtgtaagcttccagctgtgcctatctatgtttgcagctcaatttttcaggctgctgcttgttagaaaagaaatgatttgggggctgctttttgttagaagggaagctctgccgaggactctgctgccttcactatctgcctaaataatttctttctacctcctgtatcactacgactgttgctattattaatctgagaaagagactcactctgttgcccaggctggagtgcagtggcctgggctcactgcaacctccgcctcccagggtcaagtgattctcatgcctcagcctcccaagtagctgggactacaggagcctgccattatgcccagctaatttttttgtatttttagtagagacagggtttcaccatgttggccaggctggtctcaaactcctgacctcaaataatgtgcccgccttggcctcccacagtgctgggattacaggtgtgagctactgcgcccggcctcttattattatttatttattattattactgcttttggagacagggtcttactctgtcgcccaggctggagagcagtggtgcaatcatagctccctgcagcctccagttcctgggcttgagtgatcctcctgtctcagcttcctgagaaggtgggactacaggcatgcaccaccacactcagctattttttttttttgagttggagtcttgctatgttgcccaggctagagtgcagtggtgcaatgtcggctcactgccagctccgcctcccgggttcacgccgttctcctgcctcagccttccgagtagctggaaccacaggtgcccgccacctcgcccggctaatttttttgtgtttttagtagagacggggtttcactgtgttagccaggatggtctcgatctcctgacctcgtgatccgcctgccttggcctctcaaagtgctgggattataggcgtgagccaccgcgcccggcctcacattcagctaattttaaaagtttttggagagatgggctcttgctatgttgctcaggctggtcctgaactcttggcctcaagtgatactcccaccttggccttccaaattgttgggattccaggcgtgagccaccacccctggccagactttacacaataaaggtgtatttagggctgctctgcctatggagtggccattctttactcctttactttctgttttgtgtttgtttgtttgtttgtttgtttgagacggagttttgctcttgttgcccaggctggagttcaatggcgcgatctcagctcactgcaacctttgcctcctgggctcaagtgattctcctgcctcagccaccagagtagcagagattacaggtgcctgccaccacacccggctaattgtttgtatttttagtagacatggggtttcaccattttggccaggctggtctcgatctcctgacctcaggtgatctgccccccttggcctcccaaagtgctgggattacagctgtgaggctaacactcctggcctattcctttactttcttactaaacttatttcacttaaaaaaaaagtttattttctactcacacaacattcagatcagcaaggggttctgcccatggtaggctgaaataggcttcttccttttttttttttttttttgttgagacagggcctcactctgttgttcagggtgcagagccgtagcacaatctcggcttaatgcaacttctgcttcctgggttcaagtaatcctcctatttagtcccccaaatagctgggaccacaggtgcacggcaccatgcccgactaattttttttttttcattttcaacaagtgttttgtcaccaaacattaaaaacctacacaaaatacaggccaggtacagtggctcacgcctgtaatcccagaactttgggagtccgaggcgggcagatcacctgaggtcaggagttcgagaccagcctggccaacatggtgaaactccctctctactaaaaattcaaaaattagccaggcgtggtcatgtgcaattgcagtcccagctactcaggaggctgaggcttgagaattgcttggacctgggaggcggaggttgcaatgagctgagatcatgccactgcactccagcctgggtgacgagagccagacttcatctcaaaaaacaaaaatatatacagaatacaaagatagtataatagacttgtcacccaggttgaacagctactagtcatgccatgtttgcttcatctatactttgacccatttcctaccccccaatttattagttttttgggttttctttttagataaaatgtatacatattgaaaggtacaatctgaactgtaccattttgacaaattaatacactcatatagacttcccccctttaaagaatagaattactccacttactaatcattaatgtacatataagttacgtcgaagtagtatttacaatccaaatttttataaaataggtcagagttttgactgagaatttttttttttttttgagaccgagtcttgccctgttgcccaggctggagtgcagtggtgcaatcttggctcaccgcaacctctgcctcccaggttcaagcgattctcctgcctcagcctcccgagtagctgggattacaggcttgcgccacctcgcctgtctaattttttgtgtttttagtagagatggggttttgccatctttgccaggttggtcttgaactcctgaccttctgatccacccacctcagcctcccaaactgctgggattacacgcgtgagccaccgcgcctggccgagaatttttatttttaaaaaagtagagatctgtagagcacacagtaactacaatgtctatttatctcaagtaaatacagtttgatgaataaaattaaggaaaattcacctaagatgaaaaaaaaacaatcaaaccatctgtgcaatatgctatctgtaggagcatttggttaagaataacaaactaacccaacaattttattattttaataaccaaaattggcacaaatttctactattgttttcatagaaatgctccctcacaataaaaaaattttcatatcatgagagcaaaaacagcaaatatttgaaaaagtagatgtcttataaaattaagtagcaaaggccaggcgcagtggctcatgccagtaatcccagcacttcgggaggccgaggcgggaggatcacctgaggtcaggggttcgagactagcctggccaacatggtgaaaccatatctctactaaaaattccaaaattagccagacgtggtggcgggcaggagaatcgcttgaatctgggagacagaggttgcagtgagccgagatcttgccactgtactctagtttgggtgacaagagcaaaactccatctcaaaaaaaaaaaagaaaaatcacagttacctataattcgatcattcaatcaatcatcagataactcagctcattcaattatctgcaagtgtagataattctcatagcttcctattaaaattatgttttatgcccttacaaattttaacttagtttttcttttatttatttattagtaggagtctcactctgtcgcccaggctggagtgcagtggcacaatcttggctctctgcaacctccacctcctgggttcatgcaattctcctgcctcagcctcctgagtagctgacattacaggcatgaggcaccacacccagctaatcccacagtgcagggattagaggcataagccacctccccctcctactttttcttcttacttggtccgagggctgtgggacggggccccaccccagcccatcaccagagacttttggtcttggccatgtgtcctaagacttaatagttcttgcacattctcttggtaatcaattcaatttgtttcttccaaatcttgcagtaaaactgatgttccagccaggcgctgtggctcatgcctagacggttttcatcttgacatgacccttgtgctaggagtgtaaagtagaaaaccacagatggatacacatcattgccagtcccttttcactaaccaaagcgtgtcagtgaccctgcttaactttagtgggtgcagggaagtggcatgcttgcaagagtcagaaagaaagctgaaaatactaggtggagaacacgaatcgctatcaaaacccacccatttgatcacagaaactcagctcatgctccttcctgcttgcaaaatacagtcacccctccaagagagaactccatagtcccacctgtaatggcatcaagcctctttttctttccatgtggtctgtgatcattcagtagcctagccaagcttttttttttttttaaaattactgaacatatatttctgagttcctgctgtttccaaggtattaatacaatagtgcagaaatcaaagttcctaccctcttggagattgcatttgatgagttcccatttgtgtcaggccaactttcttgcattctgtttttattttaaaaataaatatggtctcaaaaaacaaacaaaaacaacagcaacaaaatggtctcagttaatattccaacagccctgggagataagtagtattatcttgagatgccttttgtgaattttcagcaacaactagaattttaaaaacaatccatagatatttccataacgtacgtatatgaaaggacacagtgaacaatgataagaaaacttaggttttaaaaaggttaagtaccttattaaaggtaaaagctggccaggcgtggtagctcacgcctgtaatcccaaaactttgggaggctgaggcaggctgatcacttgaggtcaggagttcgagacaagcctggccaacatggtgaaaccctatctctactaaaaatacaaaaattagccaggcatgggggcgggtgcctgtaatcccagctacttgggaggccaagacatgagaatcacttgaaaccaggaggcggaggttgcagtgagctgagatcgtgccactgcactccagcctaggtgacagagtgagactctgtctcaaaaagaaaaataaataaataaataaaaataaataaataaagcaaagccaaaattcaaaactcaaactttattttgactccagagttccttttatacaataccttttcctctgaagtcatgccccagctgatatcacagtcaaaatacattttaaaggatgagtgggacagaggtgtaatggggaaaaggtactagtcaaaactttttaaaaaataggcttttatgggtgtggtggctcatgcctgtaatcccagcaacttgggaggctgaggcaggagaattgcttgaacctgggaggtggaggttgcggtaagccaagatcgctccattgcactccagcctaggcaacaagagtgaagctccgtctcaaaaaaaaaaaaaaaaaaaaaaagtctttttagagcagttttagtttcgcagcaaaattgagcagaaaatacaaaaagttcccacacacccctagagccccctgctccacaaacaatcccattgttaacatcccaccgcacccggccggctctgtgtatttgtcttcacttttttcccctgcttcttggatttgctaactttatggttgccttatcttcaagtttgttgatcttttttctacctactcaaatctgttcttgaattcgtctaatgaattatcacctccattattgtaactttcagctccagaattcctgtttgtgaatttttaataatttatttctttctattgacattctcacttctttcatatatcattctcatgatctgctttagttctttgtccatattttccttcatctcactgaacacattggagacagttgatttaatgtctttgactaatagtttcaatgtgtgggcttccctagtaacagtatatgttaaatcatggtttattgtaaatgagttatactttcctatgtctttatgctttgtaattacaactggacatcctgagtattatgattcataagtctggaactccgatgctccaagtcttcatggattgctgatttctgcttactgaaggctgaaactattcatttctgacttttcccgactgttttttggcaactgtgtatcctttgggtgtgatcactgaagtgtcttttccattttgtggtcagttagtaacatgacaaagattttacaaggcatcgaacctctaagtctgagggatacgaagggactcaagagagccaaaacaagcatcttattggcttctcaggaattgccagacctagtagagtgcaaattccccaaattttggaggccaaggtctcaactgcctgctctggcactggtcacctgtttgaggaaaatggactgtctccaaattgccccactcggacggaggaatggggagtgggggctggtttgtgaaggctgttctctttctaaagtctcagtctctcttttcatcaagcactcctctcattattataagtgctgcaacaggatgactagttctgaaatcattgattctgtgtctcctgcccctcagttcactgtttatttcactggagggaggggctcccagagctttctactccgtctttttgcttgatctcactgtttgctgactttctgagatatgcccaaactcatatggctattggaaatttccacattaaaagtacttcaccacattgggcaacatggtgaaatcctgtctctacaaaaaagaaaaatacaaaaattccttgggtgaggtggcacactcccgtagtcccagctacttgagaggctgaggtgggagaatcgcttgagaccgggaggcagaggttgcagtgagccgagatcgcactactgcactccagcctgggtgacagagtgaggctctgtctcaaaaaaaaaaaaaaaaaaaaaggtacttgacatgatagtttccaataaaaacattttaacctaattccttcatttcactctttagcaatcaatatgtgaaaattatattgaactggtaaaaatgcaggttacaaagataagataaatatgaaatgctatgatacacttctgaccactggaagacataagagagagttgcaatgattatatttaatattttggttagtaaacagagagaacgcatctacccagggattcagtaggggtatgtgaagatttaataaggtaagtaatccttagtttttgagaaaccagagatagaaaatatgttggtgatttttttttttttttgagatggagtctggctcttttcgcccaagctggactgcagtggtgtgctctcagctcactgtaacctctgcctcccgggttcatgccattctcctgcctcagcctcctgagtagctgggattatgggtgtgtaccaccacacctggctaattttttttcttttttgagacggagtcttgctctcttgcccaggctggagtgcagtggcgtgatctcggctcactgcaagctccgtctcccaggttcatgccattctcctgcctcagcttcccgagtagctgggactacaggtgtctgccaccacgcccggctaattttttgtatttttagtagagacggggtttcaccgtgttagccaggatggtctcgatctcctgacctcgtgatccgcccgccttggcctcccaaagtgctgggattacaggtgtgagccaccgcgcccggtcaattttttttttttaactttaagttccgggatacatgtgcagaacatgcaggtttgttacataagtatatgtgtgccatggcggtttgctgcacctgctgacccgtcctctaagttgcctcctctcacttctcaccccccaacaggcccgatgtgtgacgttcccctccctgtgtccatgtgttctcattgttcagctcccacttatgagtgagaacatgcggtgtttggttttctgttcctgtgttagtttgctgagggtgatggtttccagcttcatccatgtccctgcaaaggacacgatctctttcctttttatgactgcgtagtattccatggtgtataggtaccacattttctttatccagtctatcatcgatggacatttgggttggtgccatgactttgctattgtaaatagtgctgcaataaacatatggtgcgtgtgtctttatagtagaataatttatgttctctttttttttttttttttgagatgaagtctcagtttgtcacccaggctggagtgcagtggcataatcttggcccactgcaacctccaactcccgggttcaagcaattctcctgcctcatccttccgggtagctgggattgcaggtgcccaccaccatgcctggctaatttttgtatttttagtagagatgatatttcgccacgttggaccaggctggtctcgaactcctggcctcaggtgatctgctcaccttggcctctcaaaatgctgggattacaggcgtgagccgccacacccggccaggattgttattactacttttaacccatttcccatttgccccgagaatactcttgtctctaatcccaatgtaacatcatatacatttctgctacattaggattagagacaaattctgttcagaaataactccaagaacagtttttatattttatttgcacattgaaactcaaccagatttgcttcagcctcaacaagtgtgtttatgtaaagttaaatgaactctggcagtgagctgcacgttttttaaaattaggaaatgagttagctaatattgaacttgaggttttagtcaatgcaatgagacaaaaagattgaataggaagaaatgagtcattatttagagattacttcattatgtatgtagaaaattctaggccagtcattgtggctcacgcctgtaaccccagcactttaggaggccgaggtgggtggatcatgaggccaggagatcgagactatcctggctaacacggtgaaaccctgtctctactaaaaatacaaagaactagccgcctgtagtctcagctacttgggaggctgaggcaggagaatggcgtgaacccaggaggtggagcttacagtgagccgagatcacaccactgcactccagcctgggtgacagagtgagactctgtctcaaaaaaaaaaaaaaaagaaaattctaaataatctacacatagttttatttttacttttgagatggactcactgtgtcgcccaggctggagtgcagtggtgcaatctcggctcactgcaacctctgcctcccaggttcaagcaattctcctccctcaacctcccaagtagctgggacaacaggtgctcaccaccacacccagctaattttttctgtagttttagtagagatgtggttttatcgtgtaggccagggtggtctcaaacttctggtctcaggtgatccacccatctcagccttccaaagtacttggattacaggtgtgggccaccacgcccaacctacacatagttttttttttttttttttttttttgagacagagttttgctctgttgcccaggctggagtacagtggtatatcttggctcaccacgaccttctcttcccgggttcaagcaattctgttgcctcagcctcctgagtagctgggattacaggcatgcactaccacacccggctaatttttgtattcttagtagagatgaggtttcaccatgttgcccaggctggtctcaaactcctgacctcaggggatccgcccacctcagcctcccaaagtgctgggattacaggcataagccactgcgcccggcctacacatagttttaatatattgatttagcaacaacaccggaggcaaagccaaagtacaaaaataaatcatatttttatataccactgtcaactagaaaagacatgtaaaactatgtcatttacaaactcaacaaaaatatatcaaatacctgggactacatctaatggaagcactatataaattctacaccaaaaaccataaaatgttactgagaaaattaaagaaagcttaaataaatagaaggatataccatggccaagaggttggaacatttaataccatgaagacaccaattctacaccaatatctattgatctatagattcaatgcaatcccagtcaatacctcagcaggaagtatacgtgtgtgtgtgtgtatgtgtgtgcgcgtgagagagagagaggagagagagagagagagactgattctaataaaaacacagggaaatgcaaagaactaagaaagacaagatgatctgtaaaaagaacagaatggagagactctactatatattgagtcttattaaaaggctacagcaagttaaacagtgtggtattagtgccatcagggactacaatccagtgggattataaaaataattgcttggccgggtgcagtggctcatgcctgtaatcccagcactttgggaggctgaggcgggcggatcacgaggtcaggagatcgagaccatcctggctaacacggtgaaaccccgtctctactaaaaatacaaaaaattagccgggcatggtggcgggcgcctgtagtcccagctacttgggaggctgaggcaggagaatggcatgaacctgggagacggagcttgcagtgagccgagatcatgccactgcactccagcctgggcgacagagcaagactccttctcaaaaaaaaaaaaaaaaaaaaaaaaaaaaattagctgggcgtggtggtgtgcacctgtaatcccagctactcaggaggctgaggcaggagaatcacttcaacctgggaggcagaggttacagtgagctgagatcgtgccactgtactccagcctgggcaacagagcgagactctgtcacaaaaaaaaaaaaattctgtaaggcaaaaagaaaaagacaacctacttttaaaagatataaaagatgtgaagcaacacttcacataaaataatatacaagtggacaatactagagagcatatttagctacattactccaaaaaaaagtaaaaccacgtggaatcccccttattcaacagtggaaattggcaagactgggcatgactctgagagtgagtcaacaatgtggcaggatatgtttcgaacctttatcctttcacagaaacattcatttcaataatcttctgtgcagaaaaatactttcacaagagtcaaagaatcagctgagagaccacagaacttgaatggaaaataacggtaagaaaagataggccgagcatggtggctcacgcctgtaattccagcacttttggaggccgaggtgggtggatcacctgaggtcaggagttccaaccagcctgatgaacatggagaaaccccatctctactaaaaatacaaaaaaaaaattagccagacgtggtggacgcacctgtaatcccaggtactcaggaggctggggcagaagaatgtcttgaaccgggaggcagaggttgcggtgagccgagatcgcgccattgcactccaacctgggcgacagagcgagactccatctcaaaaaaaaaaaaaaaaaaaaaaaggcaaaaagaaagaaaaacaagaaaaagaaaagaaaagatgtactgaagatggtaggaaagagtttcacttgatctgcatcatccccttcctgaacccaaggcagcacagagagagaaacccacttcatgggggatggagagtaaagtgagttcctggctgcactgcagacctgagcccgagttccactttagcgaacacggatacaggctgtccagagaaaagcaagtggaaactacagaaactgttgtagaacttttacttgctggtctggtcttggttgtatccatctttggccagtcacatatgtactcaagaaaccttcccaatagagtacaacaggatgagactctgaaatccctttcaatattccctgctagatattgattgttatatcaagcattaagtgtaaacttttaatggacaattagtgtaactgtggatggcatctgcttttgtttttaattctgtggattgtgtttaagcaattcaatagtatgttcctgattttgagatgctaagtggtattgcacagatgtcattttatccagcatgtgcaacagtcccatgaagtttatagagcatacccttgtatagcttcaggtgctagaattaaaattgatctgttatcacacacacacacacacacacacacacacacacgcaatcattcatgtggactcaaactccagttccatcccaggggatccaggcaccaggtcagcccctgtggaaccaggtgccaagcctcctctcttgctgaaataggcaccaggcaatccctctcaaggactccagcgagaagtccaccagcaactccccaccaaacaggctgcctagaatctctagataggctgactggcaaagtgcttttcctgctaaagccagtatgtaaagaactgactacttcaaatgcacagacactaatgcaaggccataaggatcatgaataatcagagaaacatgacatcaccaaaagaacaaaataaagtatgagaaactgacacaaaagaagtggacatcaacgaactccagatgaaaaattcaaaataatcatcttaaagaagctcagtgaattataagagaacacagagagacaactgaatgggaaacaaaacataatgaaatgacaaattcaacaaagagatagaacctatatttaaaaaaggactaaaaagaaattctggagctgaagaaaacaaggactgaactgaaagtctccatgaagagcttcaacagcagatgtgatcaagaagaagaaagaatcagtgagctcaaaggcaggacatttgaaattatccattcaaaggagcaaacataaaaaagaataaataatactgaaaaagctcaataggcttatgagataccattaagtgaaccaatatatgcattatgtaagtgctccaaaaggagcaggaaaggtgaaaaggagagaaaacatatttacaaaaacaatgatagaaaaattttgaggccagccgtcgtggctcatgcctgtaattctagcactttgcagggctgaggcaggtgggtcacttgaggtcaggagtgtgagaccagcctggccaacatggtgaaaccctgtctctactaaaaatacagaaatgagctggaggggtggtgcacaccaatagtcccaggtacttgggagactgaggcataagaatcacttgaacttgggacgtggaggttgcagtgagccaagattgttccactgcactccagcctgagcaacagaatgaaactctatctcaaacaaaaacaaaaacaaaccccccaaaatttccaaatctggaaaaggaaaaatgaatatgaagatccatgaagccccaaaaaccccaaatagggttaaggtatagagaacgtcactgagacacattgtaataaaattctcaaaaatcagagataaaaagaatttgaaagcagcaagagaaaagcaactcatcatatacaacagaacctctattcaagtattagagattcctcagcagaaacattccaggccaggagaaagtgggatgatgtattccaagtgccaaaagagaacaaaaacaactgtcaatcaagagtactataacagcaaagctatcctttagaaataaaaataagtaaataaaaactttccctgataaacaaaaactgagggagttcctcaccacttgacctgcatgacaagaaatgctaaaggaaattcttcagtttgaaacaaaagaatgccaaataaaaatatgaaaacaggccaagtgtggtggctcacgcctgtaatcccagcactttgggaggccgagggcggatcacctgaggtcgggagttcgagaccagcctgaccaacatggagaaactccgtctctactaaaaatacaaaattagccaggtgtggtggcacatgtctgtaatcccagctacccgggaggctgaggcaggagaattgcttgaacctgggaggcagaggttgtggtgagccgagatcgtgccattgcactccagcctgggtaacaagagtgaaactccatctcattaaaaaaaaaaaaaaaaaagtaaaagtataaaactcactgtaaaggtaaatatagagtcaaattcagaatgctttaatactgtaatggtgtgtacagatcattttaaaccgtagaataaaaagcaaaaatattttaaaactatacagtaatgttaatggatacaaaatattaaaatatataaaatgtaacattaataacatataagagggaagtacaagtgtagagttttttatgtgatcaaaattaagttgctagcaacttaagatgaactgttataactataagatgcttatgtaaacctcatggtaaccacagagaaaaaacctgcagtagatacacaaaagagagacagaaagaatcaaagcttatcactaccccaaatcatcaaatcacaaaagacattaagagaggaagaaagaaatgaaggaactacaaaaacagtcagaaaaagatatggaaaacagaaatagtaattacctatcaataattatttcaaatgtatgtggattaaattctccaaccaaaatatgtaaagtggctgaatggattaaaaaaacaagagccatctatatgctgcttacaagagactaattttacttttaaggacatatatgggctgaaagtaaaaggatggaaaaagatataccatgcaaatggtagccaaaagagagaaggggtaactgtatttatatcagacaagattagcttttagtaaaaaactgtcacaagagacaaaggaggtcattatatagtaataaagaggtcaattcgtaaagatgatctgccaattataaatatatttgcatccaacattggagtttctattatataagcaaatattaacagatgggaagagagagatagatagcaatacatactaatagaggaatttgataccccactctctatgatagatagaacatccagacagaaaatgaataaggaaacagtagacttgaataacactgcagaccaaaggaccttgcagacatatatagaacatttcatcaaacagcagcagaatacacatttttcctccaaatacacatggaacattctctaggacagatcaagtgttaggtcacaaaataggtcttaacaagtttaagaagactgaaatcatatcaagtatgttttctcaccacaatgatacgaaactagaaatcaaaataggaagaaaattagaaaatgcactaatatatgaaaattaaacaacacattcctgaacaataaatgagtcaaagaagaaataaaaagagaaataaaagagtagcttgacaatacaaaaatggagaaagactgtatcaaaatttatgggaggtagcaacagcagttttaagagtgaagtttatagcaataaatgcctacattaagaaaagagaggccaggcacgggtggctcacgcctgtaatcccagcactttgggaggcctaggtgggtggatcatgaggtcaggagtttgagaccggcctggccaatatggtgaaaccctgtctctaataaaatacaaaaattatccgggggtaatggcatgcacctgtagtcccagctacttgggaggctgaggcagaagaattgcttgaacccaggaggcggaggttgcagtgagctgagatcatgccactgcactccagcctgggcgacagagtgagactccatctcacaaaaaaaaaaaaaaaaaagagagagagagaaagagagagaaaagaaagatctcaaataaacaacctaagtttatacttcaaggaaatagacaaattaagcaaaagttagtagaggaagaaaataacggagcaataaataaataaaatcgagactacaaacgcaatagaaaagatcaatgaaactaagagctggttttataaaaagataaacaaaattgacaaaactttagctagactaagaaaaaagagaggagactcaaaatcagaaatgagaggacacattacaactgatactactgaaatacaaaggattataagagactattatgcacagttatacaccaacagattgggtagcctagaagaaatgataaattcctagaaacacaaacctaccaagtctgaatcatgaagaaattaaaaaagatctgaacagaccaataataaattaggagatggaatcagtaatcaaaagtgctccaacaaagacaagtctgtggccaggtggcttcactggtgaatttcactaacctttaaaagaaaaattaacactaatcttctcaaactattcaaaaaattgaagaggtgggaatattatcaaactaattttacaaggatagtattactctgataccaaagccagaaaaagcactagaagaaaagaaaattacaggctaatatcccttagaaacacaaatgcaaaattctcaacaaagtactagcaaacctaattcaacagcacattaagaggctcattcaccatgatcaagtgggatttatccctaggatgcagggatggttccaaatacagagattaataaatataatacaccatattaacagaatgaaggataaaaattatattatcatctcactagatgcagaaaatcatttgacacaattcaacatcctttcacgataaaagctagcaacaaagtaggtatagaaggaaggtatcttaacataataaaggccatatatgataagcccacagccaacatcatactcagtggtggacaagtgagtccactctcaccacttctattcaaaatagtactgaaagttttaggcagagcatttgggtaagggaaagaaagaaaagaaatttaaattggaaaggaagaggtaaaattacctctgtttgtagatgtcataatcttatgtatagaatttttttttttttagatggagtttcgctcttgttgcccaggctggagtgcaatggcattatcttggctcactgcaacctccacctccttggttcaagtgattctcctgcctcagtctcccgagtagctgagattacaggcatgcgccaccacgccgactaattttgtatgtttagtagagaccgggtttctccacattggtcagggtggtcttgaactcctgacctcaatgatccgcctgtttcggtctcccaaagtgctgggattacagatgtgagccattgcacccagcctagagaatcttacagatgccacaaacaaatctcttagaattaataaacaaattcaattgcaagattcaacatcaatgtagacaattcagtgtgtttctacacactgacaacaatctatctgaaaaaataatcaataaagcaatcccatttaaaatagaataaaaaatgctcaggaattaatttatccaaggaagtaaaagatccgtttacaaaaaaaaaattgatcaaagaaattgtagaagacacaaatgaatgaaaagatatcccatgttcatggattgaaggaattaatattgttaaaatgtccatgctacacaaagtgatccacagattctatgcaaatccctatcaaaatttcaggggtatttttcatagaaatagaaacaaaattctaaaatttaaccacaaaagactttgaataataaacacaattcagcaagaaaaacaaagctgaaggcatcagttctggatttcaaactatattacaaatctatagtaatcaagacagtatgttactggaatgacagcagacacacagaccaatggaacagaataaaaagtccagaagtaaactcacacatgtacagtcaatgaatttcagacaaaagtgctgagaacacacaatgggaaaaggagagctctttgataaatgatgctgggaaaaatagatatccacatgcagaagaatgaaattagaccctcatcttgttactgaaacaccagggatatggtctaggtctgctgcttgccacacagaaagccaatggctgaggtgatgagtattgccagggaagaaggctttaattgggtgctgcagctgaggaggtgggagatcagtcttgaatccatccccttgactgactaaaattaggggtttatgtagctgggaagaaatgtaatgatgtgtgggaaaatgggaacttgggaggcataaggaagtaatcgtgatgaatgaggggtctggatgtgatgatctggtgagtttcagttctttgatattttttgagatgcctgggttggggtggggaggttccttcttgaagaagaagaaattcagataaaacaaacataagtttcaaggtttaagactggaagtgtccatttctatttatcaaaaacaaaacagtctatgggactattgggtcagtttcagtcccctctatttatcaatttttttaatcatggggaatctgaccattgatctttctggctgcttcatgctgaggaggtgaccatgtggccaccttctgaaacacaatcattctctgtccagccaccactgcccccaccaaagacaagtcaaagcaggatgaacctacctgcaaaataagcttcagtccatggctgggcatggtggcttctgcctgtaatcccagcagtttgggaggccaaggcaggtggatcacttgaggccaggagttggagacccaggagatggaggttgcagtgagccagtctgggtgacagagtgagactctgtctaaaaaataaaaaataaaaaagctttggtcccatatacttggcctgattacccccaaaaagtgcagcaaaaatcattgtccacatagatccttctaaattggccttgctggaacctcacactgttccattataaaagaaaataggttcttactcaaattatgccaagaaacacattgacatatcagaattttaggaatctcatacaatcctagaacatatattaacaactcatctatataaatataaccctaagggccaggcgtggtggctcacgcctgtaatcccagcactctgggaggccgaggcaggcggatcacgaggtcaggagtttgagaccagcctggccagtatggtgaaaccctgtctctactaaaaatacaaaaattagccgggcatggtggcacgtgcctgtaatctcagctacttgggagggtgaggcagaagaattgcttgaacctgggaggcagaggttgcagtgagccaagattgagccactgtactccagtctgggcgacagagtgagactccatctcaaaaataaaatataacccgaaggaagctaaacaccaccttggatctgacaatgtttcctgcatgattctaaaataacaaattaacctaagatatctctcttggacttgagggaacctaatatccaaaaaagttagtttgaggtcaaaaagactgaatttagacctttaaattgtgctcctagaaattttgccaattacaaaaattttaaaacacttgatatcacaaaacatgatcacaggtcacaataaaatagtcatttatggccgggtgcagtggctcacacctgtaatcccagcactttgggaggccaaggcaggcagatcatctgaggtcaggtgttcaagaccagcctggccaacattgtaaaaccgcgtctctactaaaaatacaaaaattagccaggtgtggtggcacgtgcctgttaatcccagctacttgagaggctgaggcaggagaactgcttgaacctggaggcagaggttgcagtgagctgagattgggccactgcactccagcctgggcgacaagaatgaaattctgtcccaaaaaaaaaaaaaaagaaaaaaaggaaaacacaagtcatttatttagccaaaatgataaaacaaaaatatttaccttttaataggagatacagtttctcaaacaataagacagcatgagaccaaacaaatctgtccctctccaatccattttttccctccagtttacttaaacaaaactattttctctcttattaatattatacaaattttgttcaaaagagaaaacccaaattttacctttatatggtgtatttattaatgttaaagataattttaataaaactttatcaataaatctatctaattttcattggtttgaccatagggtaagattttgataaactttttataagctttcatgattttctattaaaaagaacagatcaatgctccacaaaaacccttactcctgacacatgggctcagaccctcaccttgcatcagtgtgcttttgatattaacgtttaatttataagaaaaactctgaactaattttatccctcaaaattggcccttataatctcacacacccacctcatccgtgatagttcctgggcctagagggattgaatagttttggttttttttctttttttttttttgagacagagtctcgctctgttgccaggctagaatgcagtggcacaatattggctcattgcaacctctgcctccccagttcaagcgattctcctacctcagcctcctgaatagctgggactacaggcacccgccaccactcctggctaatttttgtatttttagtagagacgagatttaaccatgttggccaggatggtctcgatctcttgccctcgtgatccacccacctcagcctcccaaagtgctgggattacgggtgtgagccaccgcacctggctgaatagttttaatttctagccctgtgtctcatgaaaacagttcattttgattgtcatttttccctggatctgaagacaagacttccactggttttgatgttcaagacttagcaggggtcagtgcctttttcagacccaggagtcaaagttgtgaaacttaacagcacaaggattagttaatagggtatttatactaccaaaaggcctgtcattctaacatgccacacattgaaacgctgtgatttggtgtctaggagttactgcttgcagcacttcaaaccactgtattaaagtaatcaggttactcattgcatatgtccaattgctagcattctagtgacagaactgtgaccaaaagcataaaaaatgtggtaggtgctaagtcaaacttatcaaagtaagacaactacctttttccccatcattaaaaaaaaaaatagtaaatgcaggccacgcatggtggctcatgcctgtattcccagcactttgggaggctgaggcaggcagatcacttgaagtcaggagttcgagaccagcctggacaacatggtgcaaccccatctgtactaaaaatacaaaaattagctgggtatggtggcatgtgcctgtaattccagttactcgggagactgaggcataagaattgcttgaatccaggaggtggaggttgcagtgagccaaggtggtgacagtgcactccagcctgggtgacagaaactctgtctcaaacaaacaaacaaacaaacaaaacaaacaaaaaataccccaaaacaaacccacgtgatgaatattttgtttctgacacacaatttaatgtctttaagtccaccaataccactgtatgttttgtgcaattaagaaattcactttaggctcatgatcagtaagtactttagtgctagtgctatctatgcagaagaacaaatacagtgagaagcaaagcaagtctttacagaaaatttggcttcacagaaaatctggattcatacttaactatatgaaaaacggattgccaaattgccaatgtatttctttacaatatttcttaattttccttcatcaagactaagagctttaactatgaacaacattaattagccaaacttctccaattttctatcaggttttaaaggatattctacatctaaatattttaaactttgttttctctgtgtatgcataaaggcagacatacagagagagaggaaaaaaactacatatgacatacacagaccatctatgacatgcttgaaccttcagtttgttctaaatttattttcttattccctcccttccttccttccttcccccttcctttcttccttccttccttctttcccctgcctccctccttcctttctttctttctctttcttttcttttttctctttctttctctcttttctttcttcctttcctctttcttttttctttctctctctgtctccccctcccttgcatcccctcccattgtcttctttccttctttccttccttccttcctttcttccttccttcccagtcattttactttaagacaaaaattcaccatacaagatcctttctcatataaaattattccttttttttttttttcttgagacggagtctctctctgtcgcccaggctggagtgcagtggtgtgatcttggctcacttcaagttccacctcctgggttcatgccattctcctacctcagcctcccaagtagctgggactacaatcgcccaccaccatgcccggctaatttttttgtgtgtttttagtagagatagggtttcgctgtgttagccaggatggtcttgatctcctgacctcgtgatccgcccatcttggcctcccaaagtgctgggattacaggcgtgagccaccgcacccgacaaaattattctttctttataaccttccttaccaaaaatacatcttcatatccataattttcttcacatctcactcctttacttattggttcctttcttttcaagtccataatttgaattaacctttagataacttctgaatttgataataatttttttctcaataagaacatctcttctttggcatattttatatgcagaattatatattaactagaattcttatccttagtaacctcaaattttagtgaaaacctaggaagaaagaaatcctgagctacctatcagatattagcattttataatgagaactcttccataatttttagaaacatatttccccatatcataacccttccttaattagaaatgacccagacatctaataagcataattttaaatattattcttaaacataattttaagattttaagttacacaataagttcacctgcagcacttaacccatttacactttatttttagcagtttatatagattatttacacattattttcttgttaacccttttataacttgtgaatatcagatgttcacctaaataagaaccttaaagttaactgcatgggcattttcaccaataactcagtagactcaggtgttttcattaaaccaataacattaaatagtcttacttatataaaaaaaaacacaaaaagatcattttgttttggctgggtttatggtttgataaccttctatgccaaaccctgatacctcaaaatatctagaagagacaaatatgaaacccagagaaaaatgtatgctgacaattctgaagacatttctattcctattttaccaataatttaaaaaccaccttgttggccaggtacagtggctcatgcctgtaatcccagcactttgggaggctgaggcaggtggatcacttgaggtcaagagctcaagatcagcctgaccaacatggagaaactccatctctactaaaaaaaaatacataaattagccaggcataattgcacacaactgcagtcccagccactcaggaggctgagacttgagaatcgcttgaacccaggaggtggaggtggcagtgagtggagatcatgccactgcactccagcctgggcgacagaatgagactctatttcaaaaaaaaaaaaaaaaaaagcttgctcattaaagacttacttaagtcatataaacttgaaaaatactttggacttaattaatgagcactcttttatttataagccaaattggtaggcataacatataacaataaatatacatacatatacacacatctaaatatgtactcacacacagaaacaaagatccaatagcttttactttggaattctagttgggaggctgaggcaggcagatcacctgaggtcaagagtttgagaccagcctggccaacacggtgaaactccatctctactaaaaatacaaaaattagccaggtgtggtgtcaggcgcctgtagtcccagccacttgggaggctgaggcaggagaattgcttgaacctgggaggtggagatcgcagtgagccaagattatgccactgcactccaggctgggcgacagagcaagactccatctcaaaaaaaaaaaaaaaaaaggaattctagtcatgagatagtaatacaaactcacctatctatgaacgtgttcacatggctgcattttgtctgctctgataggtaatcccatgaagactgttgtattcgtctgtcctcacacggctataaagatattgcctgagactgtgtaatttacaaagaaagggggtttaattgactcacagttccacatggctgggaggcctcaggaaacttacaatcatggtggaaggcgaatgggaagccaggcatgtcttacatggcagcaggagaagaaacagagacagagagagagacagagagacagggggaactgccacttttaaaaccatcagatcctgtcatgagaacagcatgggggcaactgcccccatgatccaatcacctccctctaggtccctcccttgacatggggggattacaattcgagatgagattatggtggggacacagagccaaaacatatcagctgtgagccaaaatttcgggtaaagtagtttccacggcagtttgattttttttttttttaagacgggagtctcgcactgtcgcccaggctggagttcagtggcgcgatctcggctcactgagagctccgcctcctgggttcacaccattctcctgcctcagcctcccgagtagctgggactacaggcgcccaccaccacgccaggccaattttttgtatttttagtagagatggggtttcaccatgttagccaggatggtctcgatctcctgacctcgtgatccgcccacctcagcctcccaaagtgctgggattgcaggcgtgagccactgcgcccggcccggcagtttgatttttagaagtcaaacctttaaacattggggtcaaacagaagaacatcacgtattaaccaggctgaaccctgcttagaacagcagcccaggctgggcgcagtggctcacgcctgtaatcccagcactctgggaggccgaggcgggccgaacacgaagtcaggagattgagactatcctggctaacatggtgaaaccccatctctactaaaaaaatacaaaataattagccaggtgtgttggcgaacgcctgtaatcccagctactcaggaggctaaggcaggagaatggcatgaacctgggaggtggagcttgaggtgagccgagatcgcaccactgcactccagcctgggcgacagagcaagactccgtctcaaaaacaaacaaacaaacaaacaaacaaacaaaacaaaacaaaacaaaacataacaaaaaagaacagcagcctaaaagcctgggtacatggaactccatcccacatgatccgcctgccttggtctcccaaagtgctgggattacaggtgtgagcccccacacccagccttggtgatgattttttggatttgacaccaaaagcacagagaacaaaagcaaaaataagtggaattgcaacagactaaagagcttctgccaagcaaaggaagcaatcaaggaaattaaaaggcaacgtatggatggagagaaaatatttgtaagccatatatctgataaggggttgagatctctaaaatatataaagagctcatataactcaacagcaacataacaaatagctcaatttaaaaatgggcgaatgatcttaataggcattcctcaaaagaagacacacgaatggctaacaggtgtgtgaaaacatgcccaacgtcattaatcatcagggaaatgcaaattaaaaccacagcgagatatgactgtggtgataattttagcatataggtgtatcaaagcatcacatttccttccttctttctttctttctttctttctttctttctttctttctttctttctttctttctttctttctttctttctttctttttctttcctttttttgagacggagtctcgctctgttgcccaggctggagtgcagtggcacgatctcggctcgctgcaacctctgcctcctgggttcacgccattctcctgcctcagcctcccaagcagctaggactacatgcgcccgccaccacacccggctaatttttcgtatttttagtaaagacagggtttcaccatgttagccaggatggtctcgatctcctgacctcgtgatccacccgcctcggcctcccaaagtgctgggattacaggcgtgagccactatgcccggcaaagcatcacattctcaccttaaatatacacagcttttatttgccagtgatgcctaaataaaactggataaaatatgggaaataataagatttggcagaatgagaaacaacagaaattctcacatttggctggtggagataatttctttctttctctttctttctttctttctttctttctttctttctttctttctttctttctctttctttctttctttctttcttttctttctttctttttttgtggagacaggatcttgctctgttgcccaggtggagatattttttttttctgtggagacagggtcttgctctgttgcccaggctagagtggagtggcaccatcatagctcactgcagcctcgaactcccaggctcaagccatcctccctcctcagcctcctgagcagctaggactacaagcccatgccaccatgccaggctatttttttttgtaatttttcatagagatgaggttttgccatgttgcccaggctggtcttgaactcctggcctcaagtgatctgcctgcctcggcctcccaaagtattggaattacaggcgtgagccatcgcatccagccatgattttcttaataagagtttctttcctctagcttactttattgtaagaatacagtgtataatacatgtaacatacaaagtatgtgataatccacagcttatgttatcagcaagtcttctggttaacagtctgctgagttaggctttgggggagtcaaaagttatatgtggccgtttgactgctcaggggttggtgcacctaagaccccacattgttcaaacgtcaactgtctatggaagaaaacgtttacgaaacatctcactttgactgttgtatgaagaatggcctgtagggggagccagtggatacagggagaccgagtaggaggctttttgcagacaagagacttaaagtgttagactctgatagattaaatatgtaaattaaaatttctaaaagtataggaataaaatgtataatttctgaactcagaagaaaaacgggaataagacaaaaatccgaaacaaggcaaggaaggagagaaacagaaatacggaagaggcaaataattcctccaaaaaattcaaaatgtatgaagaattgcaattaatgcagatggtccaaatctgtgctactcaataccatgctattccatgtcaatagccatatgttactatatggcacttggaatgtggatctgaactgaaatgtcctgttgtggccaggcgcggcggctcacgcctgtcatcccagcattttgaggggccgaggcaggtggactacttgaggtctggagtttgagaccagcctggccaacatagtgaaacgcggtctctactaaaaatacaaaaattagccagggtatgtagggaccagccccacagggtcggtgggtttttctccctgtgtgtgtgaggagatgagagatcgtagaaataaagacacaagacaaagagataaaagaagacagctgggcccggggaaccactgccaccaagacgcagagaccggtagtggccccgaatgccaggctgcactgttatttattggatacaagacaaggaggcagggtaagaagcgtgagccatctccaatgataggtaaggtcacatgagtcacgtgtccactggacagggggcccttccctgtttggcagccgaggcggagagagagagagaggagacagcttacgccattatttctgcatatcatatcagagacttttagtactttcactaattttgctactgctatctagaaggcagagccaggtgtacagtatggaacatgaaagcggaccaggagtgtgactgctgaagcacagcatcacagggagacagttaggcctccggataactgcgggcgagcctgactaatgtcaggtcctccacaagaggtggaggagcagagtcttctctaaactcctggcctcgagtctgctaagtagcccgtgttttcccttggcactgacgctaccgctagaccacgggccacttggcaacgggcgtcttcccagatgctggcgttacccctagaccaaggagccctctagtggccctgtccgggcgtgacagagggctcgcactcttatctactggtcacttctcaccatgtcccttcagctcctatctctgtatggcctggtttttcctaggttatgattgtagagcaaggattattataatattggaataaagagtaattgctacaaactaataattaatgatattcatatataatcatatccatgatctatgtctagtataagtattcttattttatgtattttctttattatactggaacagctcgtgccctcggtctcttgcctcggcacctgtgtggcttgctgcccacagggtgtggtggcgggcacctgtaataccagctacttgggaggctgaggcaggagaatctcttgaacctgggaggtggaggttgcagtgagctgagatcgagtcactgcactccagcctggatgacagagggagactccatctcaaacaaacatacaaacaaacaacaacaacaaacaaacaaagaaacacattaagaaatgcttagtggcccggcatggtggctcatgactgtaatcccagcactttgggaggctgaggcaggtggatcacttgaggtcaggagtttgagacaagcctgaccaacatggtgaaaccccgtctctactaaaaatatgaaattagcctggcgtggtggcaggtgcctgtaatcccagctactcgggaggctgaggcaggagaatcgcttgaacccaggaggcggagtttgcagtgagccgagatggcaccattgcactccatcctgggcaacagagcaagacttcatctcaaaaaaaaaaaaaaaaaaaaaaaaaaagaaacacttaaggatctggtaggaatgtaaattgtgcagctgctatggaaaacagtatggcacttcctccaaacattagaatagaattactatgatccagcaattctacttctatgtacatacccaacagaattgagagcagggatgagaacagatattgttacgtctgtggccataggagtagtattcacagtaaccaagatacagaagcaaccccagtgtctactgatggatgaatgcataaacaaaatgtggtatatccatataatggaatattattccgccctgaagaagaatgaagttttaatatatcctacaacatggatgaaacttgaagacattattctaaatgaaatgagccagctgcaaaagggcaaatactgttatgattccacttatatgaggaaatgatggagcaaatttatagagacagaaaggagaaaggtgggtgtcaggggctggggaggagggaatggcgagtgagtgtgagtgtttaatgagcacagagtttcagttttgcaagatgaaaaactttctggagatggacggtggtaatggttgcacaacaatgtgaatatacttcatatcagtgaagagtacacttaaaattgttaaaatggtaaatttttgtatttttagaagagacggggtttcgccatgttggccaggctggtctcgaacttctgacctcaggcgatccacccacattggcctcccaaagtgctgggattacaggtaaattttatgttatacatgttaccataattaaaaatagatgcatttttaaatgcttagggaatatttccaaagcttggccttatactgagtgataaatcacatcgctatcaaaggaattgatatcatatactctctctaagttactcatggaggatcagaggaggaataaaaatgtaattaggacagtatctagtttcttaatttatttttatttttaatttttatttttttgagagagtctcgctatgtggcccaggctggagtgcaatggtgtgatctcggctcactgcagcctccacctcccgggtttaagtaattctcctgcctcagcctcctgagtagctgggattacaggcacgcaccaccatgcctgaatagtttttgtatttttagtagagacagggattctccattttggccaggctggtctcgaactcctgacctcaggtgactcccctgccttggcctctcaaagtgctgggattacaggcgtgagccaccgcatccagcttggaatcttaatttaaatgaagcagagcctttcagactctttaaataggcaaaaaatgtgcctgtgtttatcatcgaattcagtggttctcaactggggtgattctgtccttccaggaaacatttggcaacatctggagacatttttggttgttacaactgggggtgatcctggcatggaggcaggatcctgagacactcctcagcaccttgcagtgcccagatggctccacccaagaggacaatctggctccaaatatccacagagctgaggcttagaaatcaaaactgacaagtatttgcagttttttattttattttttgagacagagtctcgctctgtcgcccaggctggagagcaatggtgcgatctctgctcaccacagcctccgcctcccgggttcaagtgattctcctgcctcagcctcccgagtagctaggattacaggcgcccgccaccatgcccggctcattttgtatttttagtagagatggtgtttccccatgttggtcaggctggtctcgaactcctgacctcaggtgatctgcctgcctcagccttccaaagtgctgggattacaggcttgagccacagcgccctgctgccttttcttagaaacagagattttagtttcaatggtgtttccagggcaacaaataaagaaaatcaagcagaattatagagatttcagagactgacagttactttaccagaacacaccatctgactgtgaagttcaggtgtatagaatatacaaatcttcttctataaaagaatatttgcaagtctagtttcatggtgcagaataattgtttttttcagctgtaggggaaggagaaacatgttttttcccctctgctggaaggaaaaatatgctgcctccctttctccctcccttcctccctccttccctctcctttccttccgtccctccctccctccctctctccctccctccctctctctcattccttccttccttccctccttccttccttcaacttttttttttttttttttgagatggaaccttgctctgtcgcccaggctggagggcagtggcgcgatctcggctcactgcaagctccgcctcccgggttcacgccattctcctgcctcagcctcccgagtagctgggactacaggcgcccgccaccacgcccagctaattttttgtacttttagtggagacggggtttcaccgtgttagccaggatggtctcgatctcctgacctcgtgatccgcccatctcggcctcccaaagtggtgggattacaggtgtgagccaccgtgcccggccttactttttaaaatttaaatttattggccgggcgcaatggctcatgcctgtaatctcagcactttgggaggccgagatggggtgatcacagggtcaggagttcaagaccagcctggccaacatagtgaaaccccgtttctactaaaaaatacaaaaaataagccaggcgtggtggtgggcatctgtaatcccagctactcaggaggctgaggcaggagaatcacttgaacccgggaggcagaggttgcagtgagccgagattatgccattgcactccaaccctggggaatagtgtgagactctgtctcaaaaaaaaaaaattaaattaattaattaatttattttttgagacagagtctcagtatgtcacccaggctggagtgcagtggtgcaatcttggttcactgcaacctctgcctcccggattcaagcaattttctgcctcagtctatggagtagctgggattacagacgccctccaccacccgactaatttttgtatttttagtagagatagggtttcaccatgttggccaggttggtctcgaactcctgactccaagtgatccacctccctcggcctcccaaattgctgggattacaggtgtgagccaccgtacctggctttaaaaataattttaaattaaattttatttattttttgagacaaggtctttctttgttgcccaggctggagtgcagtggtgcgatcacagctcacttcagtctcaacttccccaggctcaggtgatcctcccacctcagcctcccgagtagccggtaccacaggcaggtgccaccatgcctggctaattttttagttttattttttgtagagacaaggtctcgttatgttgcccaggctgctcttgaactcctgagctcaagcaattcacccgcctctgcctcccaaagtgctgggattacaggcaggtgccaccatgcctagctagtggccattatttattgagcatctagtttgtgccaagaactgctaaactaagcacatgtgggtcgggtgtggtcgctcatgcctgtaatcccagcactttgggaggccgaggcggacggatcacctgaggtcaggagttcgagaccagcctgaccaacatggagaaaccccatctctactaaaaatacaaaaaattagccgggtgtggtggtacatgcctgtaatcccagctactccggaggctgaggcaggagaatcacttgaacccgagaggcagaggttgcggtgagccgaggttgtgccattgcactccagcctgggcaacaagagcaaaattccatctcaaaaaaacaacaacaacaaaaacaaaaaaacaaacaaaaaaaccctaagcacttgtgctgttttaacgatacccagatagtagggggaaatatgagttatgacatagtggggatgcttttatcactttttacaggtgaggaaactgaggcacagcaaggttaagtcagccacttaaggtcacccaaccagtaactgacagagtggagatctggatcagaaggaagaatggaaaaaaaaatcttaaattattttaaaatcactatccttccatgcaggatctctttgaatcttcccagtgacttagtgaggaatgagctattttttttctgtattgtacagctggggaaactgaggcttagtgaggtgaagggacttgaccagagtgatacaggagcccctaaactgtggcaattcagttctcagggccaagttttggtaagagtgtcctgaagtggggtgagggcagcgtaaagaggaacatggagaagaaagcgtgggagggccgggcgcggtggctctcgcctgtaatcccagcactttgggaggccgaggcaggcggatcacttgaggaaaggagttcgagaccagcctgcccaacatgacaaaaccccatctctgccaaaaatacaaaaattagctagacgtggtgctgggcacctgtaatcccagctactcgggaggctgaggcaggagaatcacttgaacctgggaggcggagattgcaatgagtcaaggttgcaccaccacactccagcctgggcaacagaaaccctatctaaaaaaaaaaaaaaaaaaaaaaaaaaagcaaacagctgggcacagtggctcaagcctgtaatcccagtactttgggaggccaaggcaggagggtctcctgaggtcgggagttcgagaccagcctgaccaacactgagaaaccctgtctctactaaaaatacaaaatgagcccggtgtggtggcacatgcctgtaatcctagctactcgggaggctgaggcaggagaatcacttgaacctgggagacagaggttgcagtgagccaagattgcaccactgtgctccagcctgggcgacacagagaaactcttatcttaaaaaaaataataaataaacaaacaacaacaacaacaaagaaaagatgggagatgaagggaagcaggtgcaaagggctggatttgaaatcctgagatgataaaggtcaacacccaaaggctcaaaacccttctccaaaccctcatctgagctcacccagcacctgtgacgggggcccacctgcatagaaagacactcaattggatgttcatcactgcattgcgtataacactgtgaagcaggctacgtgtccatcagtaggagagcagataataaaatggggtctatgcataggctgataccagcccatatatccacccagaagatataggtgagtgggttagggcaagggctctgaaaccagaaggatctaccacttcctagctgaagaaccttgcactggtgacctcactccctcgtgcctccgttagctcatctgtagttaggggacaatcatagtatcaacatcgcaggggttaagatgatctgggttaagcactgagcatgtggaaatgactcagtagatgaggtgtcagcaaacttttcctgtggataagaccaatggagacctctaaaatcactttccttgtcacctctcactgaccaagacagtaaatcaatgcaaggttgggccaggcacggtggctcatgcctgtaatcccagcaccttgggaggccaaggcaggtggatcacctgaggccaggagctcgagaccagcctggccaacatggtgaaaccccgactctactaaaaatacaaaaattagccgggcgtggcggcacgtgcctgtggacccagctactagggaggctgaggcaggtgggtcacttgaacctggaagccggaggttgcagtgagccaagactgtgccactgcactccagcctgggctgcagagtgagactctgtctcaaaaaaagcaaaagcaaaagcacaaacacaaacaaaaacaaaaacaaatgcaaggttgcatcacagtggaatagcagagattaatgtcgcccttaagggcctaaagacatggtgagcaaggtctcagatccctcagggatgaggatctaggtgaccccaccaggtgagccacctacaccaacagaagggccacctgaagatgaagggactctagaagggacagtgggagagggagagggtgaacactcacgggggctgctagactccactcctgcagtgtaaactgtggctcatcccaccaaccttcattttctggctggcatagagaccaagaatcctaagtagctgtcctcaaatgcagtgagtctccttataaaacaaatgaatctgggccgggcgccatggctcactcctgtaatcccagcactttgggaggctcagttgggcgaatcacctgaggccaggagttggagaccagcttggccaacatagtgaaaccccatctctactaaaaatacaaaacttagctggacgtgatggggggcacctgtaaccccagctactcgggtggctgagacaggagaatcgcttgaacccaggaggcagaggttgcagtgagccgagatcgtgacactgcactccagccaaaaacaaacaaacaaacaaacaaacaaacacacacacacacacaaaccccaaatgaatctgagtggcttaaggggcgggctatagcggatgctgtggtgtgctacccaatccccaccgttctcctattgctattgtaacaaattaccacacacttaatggcttaaaacaacacagattggttgggtacagtggctcacatttgcagtcccagcactttgggaggccgaggtgggagtgtagtgagaagccaggagtttgagaccatcctgggcagcatagtgataccccatgtctacaaaaaaaaaaaaaaattagccaggcatggtggtgcatgcctgtagccccagcattttgagaagccaaggtgggaggatcgcttgagccaggagttcaagaccggccagggcaacatagcgtgactctgactctacaaaaaattaaaaagttagtcgggtgccatggcatgggcctgtattcccagcaacttgggaggctgaggcaggaggatcatttgagcccaagagtttgaggctgcagtgagctatgatcgcaccactgcactccagcctggctgacagctggtctcttaacaaaaacaacaacacaagtctattatcttaaagttctggagcccagactccaaaatcagtttcaccaggcttctccctgtgatttttcaatccagggttaaatgcactccaggctgctggagtgcagtcatatgatcgtagctcactgcagccttgaacccctgggctcaagcaatccttctgcctcagactctcaaagtgctgggattacaggcatgagccaccacgccctgccctccctgtgtctttataagatggtccctttttctgtatccctgtcctaatctccttttcttatacagaccctaatcttattgaattggagctcatcttaagggcctcattttaagttaattaccttttcgaagattcaatcttcaaatacagtcaaattctgaggtggtgggggcgaggacttcagtgtgtaaatttcgggggaacatagtgaggcccgtaccatggaggaaagttcctacaccctgctttttaggtagagatctagaaacatggaaagttccccagaggagttttagaggaacctaaagatagagaaggcttggactctgctcaccacaacagagaccagagaagcggcaggtctccaaaaaaggaagtgacttaatagtggctttgggcatctgaagccacagaaagcctcaaaaagtttcctgtgcctcaactcagctgaaaatcggcctcacgagcaaggtataggagtagtagagaaagtgctgcctttctttctttcttttttttttttgagacagagtcccactctgtcacccaggctggagtgcagtggtgcgatctctgctcactgcaagctccgcctcttgggttcaagcgattctcctgcctcagcctccccagtagctgggactacaggtgtgcacaaccacgcccagctaatttttgtatttttagtagaggcgggggtttcaccgtgttagccaggatggtcttgaactcttgatcttgtgatccacccacctcggcctctcaaagtgatgggattacaggcgtgagccaccacgctcagccaaggcgctgcctttctaaggaacaaggacaagaaagaaggtctcataggccaggagcagacggatggtggggaccttatggacatgcattttgagaattagtcttttcttcacccttaatgcctccgcaattccaaagctccctggaactttgacagtcttgggaaagcaggatgtagggagagatggtttccgagggactgttggcaggttctcagcattctggtacaaaggggtcttgaaatataaataacgttacgttaatgaaaaaataaagttaactttgcactccttgtggattgagatttaatttttttttttttttttttttgagacagggtctcgctttgtcacccaggctggagtgcagtggcatgatctcggctcactgcaacctccacttcccaggctcactggatcctcccgcctcagctcccttagtagccgggaccacgggcatgtggcaccacgcccagctaatttttgtagagatgggattttggcacgttggccaggctggtctcgaactcctgatctcaggtgatccacctgcctcgacctcccaaaggctgggattacaggcgtgagcctccatgccccgcctggattgagatttatataaactgcttttgtgccttagtttgagttcccataaaagcagaccctgggaaaaagatgtgggggcaagaggtttattagctagctattgctgtgtaagaaatgaaattatcaagaacctggcagcttaaaacaacacatctttatctttttttttttttttttttttttttttgagacagagtctcgctctgtcgcccaggctggagtgcagtggtgcaatcttggctcactgcaagcttcgcctcccgagttcacgccattctcctgcctcagcctcccgagtacctgggactacaggcacccgccaccgcacccggctaattttttgtatttttagtagagatggggtttcaccatgttagtcaggatggtctcgatctcctgaccttgtgatccgcccgcctcggcctcccaaaatgctgggattacaggcatgagccactgcgcctggcccacatctttatcattatctcagtgtcctcagtcagaagtccaggtacagattcacgtctgtaatcccagcactttgggaggctgaggcaggcgagtcacctgaggtcgggagtttgagaccagcctggccaacatggtgaaaccctgcctctactaaaaatacaaaaattagttgggcgtggtggcaggtgcctgtaatcccaggtactgggaggctgaggcgggagaatggcttgaacctgggaggtggaggttgcagtcagccaagatcgcgccattgcactccagcctggacgacaagagtgaaactccgtctaaaaaaaaaaaaaagttcaggtagacggacagtttaattgagcattgtgctgtgggtctcaagactacagttcatatgtcgactgcactacattctttcccggagtttgcagtccttttccaagctcagctggttgttggcagaattcggttccttgtggtggtaagattgaggccctcggcttttagaggcttcttgccgttctgtgccatatgaccctttccataggcagttcacagctggcaatgtgcttcttcaaggccatcagggaacctctcattccagtctgatagtcctatataatgtaacctaatcaagggagtgatagcccatcacctttgccatcttttaaatttttatttttatttttttaaattgagacagcatctcgttctgttgcccagactagagtgcagtggtgtgatcatagctcactgcagcctcaaacttctggactcaagcagtccttccacctcagcctcctgagtagctgggactacaggcatgtgctaccacgcctggctaatttttaaaattttttgtaggccgggtgcagtggctcacacctattatcctagcactttgggaggccgaggcagacggatcacctgaggttaggagtttgagaccagcctggccaacatggcaaaaccccatctctactaaaactataaaaattagctgggcgtggtggcacatgcctgtaatcccagctactcaggaggtccaagcaggagaattgtttaagcctgggaggtggaagtttcagtgagccgaaatcacgccactgcactccagcctgggcaacagagtgagagtctgtctcaaataaaataaaataaaataaaataaaataaaataaaataaaataaaataaaataaatttttttgtagagccaaggtcttgctatgttgcccaggccagtcttgaactcctgaactcaagcgatcctcctgcttcagcttcctgagtagctgggactacaggcgtgtgccaccacacctggctaagtttttaaattttttgcagagccagggtcttgccatgttgcccaggctggtcttgaactcctgaactcaagtgatccttctgcctcagcttcctgagtagctgggattacaggcatgcgccaccatgcctagctaacttaaaaaaaaatttttgtagagatgcgatctcactatgttgctcaggctggtttccaattcctgggctcaagcagtcctcccgcgttggcctcccaaagtgctaggattaccggtgcaagccaccacacacctggccatctttgtcatcttctattggttagaagcaagtcaggttctgctggaactcaaggagaggggattatacaaaggcttggatgccaggaggtaggaatttttgggaaatcaccccagggtctgtacaccacaaaggcatccccaggaaatgtgagaagaggtatgggtaggaactaatacagggtgtattagtgcacaggtgtctgctatgggctatcccattggggactttggggtgactgtgtagactatgccttggagttgtcccaccctggggacagggaagccgggtatttatccactaaatcccatccatcattggttaaatgctgctccttgtggtgttaatgatggaaactctctattgcctataactgacaccacaattctttacactggcatttacaatttccccttgccctgcctcattttcctctgtgacccctgccatggtcaccctccactgcagccttagactagcgatggccctgaatttcctccctgttcactgagatcttcctgatcctcatccagccttccatggcctcagaccactgagctctctcccgttgcagaaatcctgcagaacatttttcctggaccccttactgggtgtaggggaccccagaataactcatgtccaggctcctttttttgaggatcctctgggatgggtggaggagtcacagctggacaagatgcttttagttctatgtggtcagggctggaagaatggagccccagggatggagcccaggaatggaggagatgggatgtgggtgagattcagaaaaagctttatggaggaaggctgagcttatctttttgtctccttaccccaaaacctccctcccaactttgatgctggagcctgctgttccttctctgatcagaatcctctctcttcatgtctcacccctgtcctaacaggggtgctatgaatccactcttctggcccccaccattagatcactgatgtgatctaaccacatcagtctcctgctgaaagacctccaatgtttgagatatatatatatatatatatatgaaacttaatggttccatttctctggagaatcctgactaatacagattttggtaccaagagttgttctaaactgggtgtgatggctcatgctggaaatctcagcattctgggaggctgaggcaggaggatcgcttgaggccaggagttcaaaccagcctaggcaacacagtgagacctcatctccaaaaaaatttttttaattagccaggtgtggctgggtgcggtggctcatgtctgtaatcacagcactttgggaggccgaggtgggcggatgaagaggtcaagagatcgagaccatcctggccaacatcatgaaaccccatctctactaaaaatacaaaaattagctgggcatggtggcacgtgcctgtagtcccagctactcgggaggctgagaagggagaatcacttgaacctaggaggtggaggttgcagtgagccgagataatgccactgcactccaacctggcaacagagcaagactccatctcacaaaaaaaaaaaaaaaaaaaaaaaaaaaaaaaattagccaggtgtggaagcgtgtacctgtagttctagctgtttggaaggctgagatgggagaatcccttaagccaaagagtttgaggctgcagtgagcgatgattatgccattgcaatccagcctgggtcacagagtgagaccccaactcaaaaaaaaaaaaaaaaagtggttctagaggaagaatgagctttctgaattgcttctcgttcttctgaaattggctctctaatctgattaaactgaaagaggctaatgactctttacagtagtaagagagcactggtggtccatggcatgatctggcaatagagagatgcagatatcaccactgtatactcctaattaactatctataagaagcaaagatcttgtcactgtgtatttgatacttctgagaagttttgaaaatcgaatgaatataatgagattggctggctcctcctaatgtcactggatagagtgctgagagaagaggatgaacttagggatttgaattcccagctcaagcactgcataagtaacctgacatcttctatgtgtgccctaaaggacatccttgtctcctgtagcctcagggctgagagtggtgaaaagcaaacacagaatcttattctgtgattggccggatttcagggcaagttggactcccagcttccaaggatgtctactgataaactgagggcattgattagtatcaatggtatcctgtaagaatagtatcctggaaactggaattgggatatgtgggaagacaaggatgaagttgaggacatggagcacctaaattctgagtcttgtttgccgctggaaaggcctctaccttcccctccttggttctgtttctctggagaaccctgactaacatgactggcttgaatctggatccaaatgtaatcccagcactttgggaggctggcatggtggctcacatctgcaatcccagcactttgggaggtgaaggagagcgggtcacttgagcccaggagttcaagaccagcctgggcaacatagcgaaaccccgtctctacagaaaatacaaaaataagctgggtgtggtggcgcatgcctgtaatcccagctacttggaaggctgaggcaggagaatcacttgaggcaacatggttttatacatacgtgaaggagatacaccttctaccccttggagataccttcaaaatattcaagggggcatgtgaaatgggatgatatctgaaacaatatcaaatttagaaagagggtagttgataaagtcagcaaggcaggacattgaaactattgaatttaagtgatggatttatgggtatttcttagactattgtcctctccttttggaaggagaggaaagtttgcacactggatttgttggatgcatttcctactaaaaaaaaatcaataaatattttccctttacactctctacgcctactgctgttttttcttaagctattggatacactaggttgcttgtcctgtagatttttccagtgtgatttcacccttgcagtgtcattgcacgtattcttctatcccctaaccctgtaaaccagagcttggcaaatattttctataaagggcccaatactaaatacttttggctctgtgagttatgcagtccctgtcacggcaacttaatccttccatttaagtgcaaaagctgtcatagacagtatacaaatagacgggagtcactgtagaccaataaaaatctttatggatgctggaattttaattgcatatactttttgtgttataaaatattattcttcttttgacttaaaaatgtgaaactattcttaacttgtgagctgtacaaaaattggaggtggggcaggattgtgtccacgggccagtttgctgacccctgctgtaagctggtaatctgaacataagacttgatcagagtcgggttcaattctgggagacagagggagatttaaataccctgtaagggagattaaaacgccctgtgggtgaagctagactctggggaattggttttattaaggaaatgtcatttcgttgaacgtgatcatggcggcatggttttatacgtacatggaggagatataccttttatcccttggagatacattcaaaatattcaaggggggatgtgaaatgggatgatatctgaaataatatcaaatttagaaagagggtagttgataaagtcagcgtggcaggacattgaaactattgaaatgaagtgatgaatttatgggagtttcttagacaattttcctcttttttgtgcatgttcataaattgccctaataatttatttatttttttgagacagggtttcacccctgttgcccaggctggagggcagtggcacaaccttggctcactgcaacctccgcccctgccaggcttaagcgattctcctgcctcagcctcccgagtagctgggactgcatgtgcatgccaccacacccagcttatttttgtattttttgtagagacagggttttgcgatgttgcccaggctggtcttgaagtcctgggctcaagtgatccgccctccttggcctcccaaagtgctgggattacagatgtgagccaccgtgcccggccctaataagtttttgtaaaaatctctaggcattaacaatttttaaaaagtattctaatggtcttccattagaaatcttccattacacttaaaataaaattctaatggcttatacaaagtccttcctcttctgtctcctccacccctctggccactgctcactgcaccccgccctcctcctcactcttcacctctggactccagagactctgggtttcctttgattcctggatgtcttcaagctccttcctgcttcagagcctctgcacaagctgctccctttgcctagagccctcggccctccagtctttgttttatcaactcaaaggttaaatgtcagaatcctttgcattcccaaatcctggtcatgagccatgttatctaaggatattcaaggattccaaactcaaatgcttacaggggccaagtaattggtgtaaacatgtaaagtaagctggattctgtttttaacactcataggcacacaccttgattatttaaaatatagaaaacattctttatttgccacaaaggactgttatggcagacagaataaggcaatttctccccaaccccacacctcaagatgtccacatcctactccttaggatctatggatatgtttgtttccttacacagcaaaagagatttagtagatgtgattaagtaaaggaccttatcctgggttatgtgggtaggtccaacctagtcaaaaggatttttgttttttgtcctttttttttttttttggtaagtgacagggtatcactgttgcccaggctggggtgcagtggtgcgatcatggctcactgcagctttggactcctaggctcaagcaatcctcccatctcagcctcccaagtagctggaactataggcatgcaccaccacacctggctaatttttgattttttatacagacatggtctcactatgttgcccaggctgatcttaaactcccggacttaagcgatcctcctgcctcagcttcccaagtagctggaagtacaggcatgcactaccactcctggctattttttttttttgagacagtgtcttgctctgttgcccaggctggagtgtagtggtgtgatctcagctcactgcagcctccaccttctgggctcaactgatcctcccacctcagcctcctgggtaactgagactacaggtgcatgccactatgactggctaattaaaaaaaaaattttttttttgtagagatggggtctcaccatgttacccaggctggtctcaaacttctggcctcaagtgatcctcccaactcagtctcccaaagtgctggaattacaggcatgagccaccatgctcagtctaatttttttttaatgttaatttttgtaaagatgatgtctcagtattttgcccaggctagtcttgaactcctggcctcaagtgatcctcccatctcagtcccccaaaatgctggaattacagttgtgagccaccacacctggcctatttttgtttttttaattttaatgtttgtagagatgaagtatcactatgttgcccatgctggtcttgaactcctggcctcaagtgagcctcccctccttggcctcccaaaatgctgggattatagcagttcccagtcagagattcctataaaatggaggcaggaagggatcagagtccaagaaagaggtgataatgggagcagtggagggagagagagagatatttgaaggcgttatacttctggctttgaagacagaggaaggtggacatgaactagggatggatggtggcctccagaagtgagaaaaggcaggaaaaggctgggtgcaatggctcacgcctgtaatcacaacactttgggaggccaaggtgggtggatcacctgaggtcaggagtttgagaccagcctgatcaacatggtgaaaccccgtctctactaaaaacacaaaaattagctgggcatggtggtgggcacctgtagtcccagctactcgggaggctgaggcaggagaatcacttgaacccgggaggcggaggttgcagtgagccgagaccatgccattgcactccagcctgggtgacagagtgaaactccgtctcaaagaaaaaaaaaaaaaaaaaaagaaagaaaagaaaagaaaagtcaggaaaatgaattattccctagaactcccagaaaaaaatacagctctgctgatactttgattttagcctcttaagactcattttggacttctggcccctagacctgtaagaaaataaaatagtgttgttttaagccactaagtttgtgatcatgtgtttcagcagcagcagggaactaataaaacgatgaactctcctttttcttaaaactttggtcatctcaggctgttatatattttctcacctttgatggagaagtgacaacttctctgtgcctggatttccccatccataaaataggagtcaaaatagtacctccctgcaaggttattgtgagaattaaataagttaaagtgaatgagtaacacttatcatggtgcatagtgagtactccagaaatgtgaagtataattaatattactattacttaaaaacaacagcacaagtatgatgatgaaaggcgactggcattcagcctcagtgtgagagacaactgggagtggtggggactgtggtgagctgctgagcccatgccctatccaaaggagacagccactatccaacctgggctgttgtcacagcttctacctccccaagaaaacccagaaatctggatttgtccatgtctatgtgaaaattttcttttttcttttttttttttttgagatggagtcttgctctgtctccctgtctggagtgcagtggtgcaatcttggctcactgcaacttccacctcctggattcaagcaatcttcctgtctcagcctcccgagtagctgggactacaggcacatatccatatgcctggcttgtgggtgaaacacccatagggtttcaccatattggttaggctggtctcgaattcctgacctcaggggatccacccacttcagcctgccaaagtgctgggattacaggcgtgagccacccacgtgcaaaatttttgaatatttatataatggttaccaattcccatttaaaaaacacactagatgtggcctgtgaatgtaaggccacttttgatgtaataactgaaaagaatcagaaatttaaatgtgcacatgattacagcatgcttacaaaaagaatagctacgaaggattcaagagctcactgtgggccaagctctgtaaaagtacctaagggttcaagccatgtaatctcacaataagcagggtaaggtagaggccacttttcatcgtcttttaaagatgaggaaactgaggcccagagatgccaaggatgaatactaaggtcacccatctgggaagtgacagagtggggatttgacctcagggggtctggcttgtaaaggaacatagaaaatatcagaaccctcaacctctttgtgcaaaagggaaggctaagcttggaggctgagtcattgtcacatcctcatccaatgaatagctgtcactggttttatgtatcagctatatccccccacccccaaaagtaaaaggcctcaggcatctatgaagggctaatccccacagatctttcctcaggaaattctttgctggcttcctataaacaagaacatgaaaatgttaactttaggtctgcaatctaaagctaaagtctgttccatttcacagtgacaacgtcaattacaagcttatcttcccaggtgaaagacaaagacaagacaagattagtcattgctcccttcctcttcaaacattcaccttagcttatgtaaaatgtagatttactgggcactaactaaagtctcataagaatgtaagggtttgccttactgcctacctgcctttcttcctcagtgccattcccctctttaaggaaatgtgtaggccgggcacggtggctgatgcctgtaatcccagcactttgggaggccgaggcaggtggatcacctgaggtcagtcaggagttcgagaccagcctggccaacatggcaaaacctcgtctctactaaaaatacaagaattagccgggcatggtggcgggctcctataatcccagctacttgggaggctgaggcaggagaattgcttgaacccagggggtggaggttgcagtgagccgagatcatgccacttcactccaacctgggtgaaagagcaaagctccgtctcaacaaaaaaaaaaaaaaaaaaaaaaaggccgggcgcagtggctcaagcctgtaatcccagcactttgggaggccgaggcgggtggatcaggagatcaggagatcgagaccatcctggttaacacggtgaaaccccgtctctactaaaaatacaaaaaaaattagccgggtgtggtggcgggcgcctgtagtcccagctactcggaaggctgaggcaggagaatggcgtgaacctgggaggcagagcttgcagtgagccgagatcccgccagtgcactccagcctgggcaacagagcgagactccgtctcaaaaaaaaaaagaaaagaaaagaaaagaaaagaaaaatgtgtaaatatgaaacctcctgaaacttctttggaaaaacagccacagaggcaactgtggctggtgattttcccagatgtgtgctaaagctggcttcagaaaccttgatcaattgactcttgcccctgtctcacattctggtcatcaggctccaggataagaaccatcctgcttctctgcaacgatgcgtctcaagtgttcaaatgctgtggcattccccaggaggaacatagcgtcctactatgagattaatcatttgttttcttggccaggcatggtggcctgtaatcccaacactttgggagaccgaggcaggtggatcacctgaggtcaggagttcaagaccagcctggtcaacatgttgaaaccccatctctactaaaactacaaaaaaaaaaaaaaaaaaaaaaattaaccagatatggtagcgtgtgcctgtaatcccagctactcaggaggctgaggcaggggaattgcttgaatctgggaggcggaggttgcagtgaggcaggatcgcgccactgcactccagtctggacgacagagtgagactgagtctcaaaataataataataataatttgttttctcatcattgcttctttacttctaccacctcttggtcttggcaagagatgaagaggggggaggatttcctgcccagggggtgggggtagggtgaggacggtggacttcaggtcctgaggaagagctgatggtggtggtgggttggtgggtgcggtaaggaggcaatctgaaaagaagctggagcgcaggaggcgaaaagaggaaatgaggtagataaacttctcagaagtgaaaagtaggttagcagcctggtataggaggtctctgtccctatactttattgaaggtcaagtacgggtgtacagtctcttgttgcaccagcttctgtctttgtggggtttttccttgttctcctcccatcttttcctcccctccctgtctttcctttctctcctctctttccccttcatctccttcccctctccactcctcctctggctctccccttttttccctctccatcctcctcctcctcctcctgccacctcctcctcctttccccctctttcttcatctgcccttccccatctctttccatcctcctcctcacccacgtctccttcttcctctctctccagctcctccaggttgagagacgcctcccagaatgatttttggaggctaaacttagcaagaggttccatccccacgcggaagttggtagctgctggtgacttttatcaatacatgctctccacaccttggtttcctcatcaaagccacagaaacagaaagactgtgatgagagtgaaggaaactccagcgggggttggggccaggcgctgggggctctcctacctcccaccagcccagcaagggcagggaaggcaggaaactgccctgaatccactgcgtacccttggcagaggtaaagggcatccttgcctctctcggtccacagttctgcgtctaagatgtgcagacagtaacagctcctgcccgaagccaaaagatgcatataaatgtataactcacacaagacgcctaggccttgaataggccgggcacggtggctcaagcctgtaatcccagcagtctgggaggctgaggggggtggatcacctgaggttgagagttcgagaccagcctggccaacatggtgaaaccccgtctctactaaaaatacaaaaagaaaaaaaaaattagctggttgtggtgggcgcctgtaatcccagctactgggaggctgaggcaggaaaatcacttgaacccgggaggcagaggttgcaggttgcagtgagctgagatcacaacattgcactccagcctgggagacagagggagactcagcctcaaaaaaaaaaaaaaaaagaaagaaagaaattcatttatgtttcatatataccttgtacacatagactgaagataatttcataaaatagtattaataattttgtgcatgacacaaagttggtgtacactgaaccatttgaaagcaaaggtcactgtctcagccacccatgtggacaatctgtggttgcttggcatcatcatcattccttttatttatttattatttttatttttatctttttttgagacagagttatgctctgttgcccaggctagagtgcaatggcgtgatctcagctcaccgcaacctccacctcctggattcaagcgattctcttgccttagcctcccaagtagctgggattacaggcacgtgccaccatgcccagctaattttgtattttagtagaaatgaggtttcaccatgttgaccaggctggtctcgagctcctgacctcaggtgatccacctgcctcggctggaattccaaagtgctgcgttgtaaccgggcaagttatagagaaacgccacactcttagactaattaaggagtcctttattagccggcgactgagagatggctagcgctcaaaattctctcagccccgaagaaggggctaggtttctttttataccttggtttagaaggggaggagggagcagagctgaagcaattttatggaagcaaaacaggcaagaaaattaaaaagataaatggtaaaaggaaaacaaacagttccaggtgcaggggctttaaatctatcacaaggtgatagacgcgggggctttgggtgctatcaaccggacgaattcctgggaattgtggatatagcttgtcacagtatcttatcagtaatcgcattcttggatgtgctgggagtcagcttaagtccttgaggaaggggggtgggtgagggactgcaaatgaaggagccaaaatggagtctgtctggctttctcagctaagggagggtcaatcaggttaaaaacaaggtagggtatgacattccccactcgtgttttggggaatcgaatcattgattcctcggttataacaagggggttatattgggtcctaagatacataagtttgacagaagctatgcgctgctttataaagttaagaacccatttaatacacaaggcctgaagactaacaagaggaggagaatgggtcctgccaatccagtaatgagagtcgtcagccatggattccaattaagcatgttttggtaccagggggtgttattttctcgtttttgctggcatctatctagattttctcgaactttttggagagtatcttttatgactccagactgattggcatagaaacaacgactctctcctagagctgtgtgtagccctccttgggagagaaatagcagatctaagcctcggcggttttgaagaactacttcagctagagactctacctgggtatgcagtatatttatggctgattggagattgcttaaattagcatctacttgttttttttttttttgagacagagtctcgctctgtcacccaggctggagtgcagtggtgcaatctcagctcactgcaagccccgcctcccgggttcacgccattctcctgcctcagcctcccaagtagctgggactacaggcgcccgccaccacgcccggctcgttttttgtatttttagtagaaacggggtttcaccgtgttagccaggatggtcttgatctcctgacctcgtgatccacctgccttggcctcccaaggtgctgggattacgggcatgagccaccgcgcccggccagcatctacttgttgagacagggacattagtccggtctctccttgaaccagggcagccgtgccaatggctgctgatccagctatgctaaggccggccagaaggggcacaaggagtggggcagctcggtgaaacctggaatgtaattcagggggagcgatgagaagctgtccttctggcccactgtacgtgtagacctgggggagcacatgaaccaacacgcacaggaggggtcctggttcagtcccattgatgcagcgagtgagacctaaagtgcaggctaaccaggtattgttaggtgcctggcaggagactgaggcacttaagggagtaagtagagactgattacaggtagcctgtaagggagaagtagagaagttatatccagtgctaattagagaagaagtattcccggacatgtctcctagtatgagggcatgggggcgtgtatgacaagaaagagagcccattttattttgttttgtttagttttgtttgaggcagagtctcgctctgtcgcccaggctggagtgcagtggcacaatcgcggctcactgcaagctctgcctcccgggttcacgccattctcctgcctcagcctcctgagtagctgggactacaggcgcccaccaccacgcccggctaattttttgtatttttagtagagatggggtttcactgtgttagccaggatggtctcgatctcctgaccttgtgatccacccacctcggcctcccaaagtgctgggattacaggcgtgagccactgtgcccggcgaaagaaagcccattttaagcatagcttctactcctaatccaacatcatatgggggtttggccttcaggcacaaccaacaatctcgggctagttgaggccgggtgagattaaggaggtgctgtaccctgtccagaatggacatcaggctgggttggaggtgttgccgttgcagctgaggtttagaaaccaggaacggcggtgggaaagttaaatcgaccctgtctgggtgttttgggaacataggattacctaaatcagttaaaggtccgattggcttaggagagctctatgggaccaggatttttttctggatggtgaacatagttccaacattaaatcctgagatataaagccttaatccccatgacatgccataataccattgagctgtaccagggttatggatagttgtaggaagagggttgcaatttctcatagtacacagtctaggatgggaagtgcgagttatggagagggttgaggactgggttgatcctccagggtaagtggctagggttacacaggaccagcgagggcagaaaaactgataagaatcttgacaacttcagtcagggtgatttccaagacagaggtaaaagtcagcctcctggagtcctttttctgcacctttagagcttccacatgcagtccggcttcctatgtgtccaaaccctgctgcaaggtcgacgttccctgttcccatgaccggcagattgcgttgctcttcacgggtgagggcaggctctgggaacaaagcacataaatcgactgcaaaagagacttccttggaggtccccgccttccaggtggtgattgcaaacacacgtcctgtcgtgaaagaagtaaggagaaaagagtaggaaggagcagagggcatgacaggtggaaacaaacaaaagaggtaaataaaaagaattaatccaatggcttcactcgacttaggtgcagttttaaggggcccgacccaggcttggggtctgtgctggggtcttgcttggggtcttgctggactttgttggcctttttgatgtgagagtgatgaacccaagcaggaatgctgtccactttcagatctgtcggcatggtgaggatgacagtatgaggtcctttccaggcaggagtgagtccttccttctggaactttttttttttttttgagacggagtctcgctctgtcacccaggctggagtgcagtggagcgatctcggctcactgcaacctccgcctcctgggttcacaccattctcctgcctcagcctcccgagtagctgggactacaggcacctgccaccacgcccggctaattgttttgtatttttagtagagacggggtttccctgtgttagccaggatggtctcgatctcctgacctcgtgattcacccacctcggcctcccaaagtgctgggatgacaggcgtgagtcaccgcgcccggccgagaaattttgtaacatgcgttggagagggctccaatctctacagggctgggaagaagagtttcccattctggaggcaattaacaaggtttaagcagaaatataaaacccagcacggacagagaaattcacggcctagagggctgcagtatcggaagaacagaggtagatgtgcggggtaagggatggggatgaggaggaaaaggggccactcggatcttctcaggctgggaggagccgtgctgggcagcgctgggtcgccaggactactccgcagtccccccgccccgcctccaggccccgtcaggcgctgcaagcccagctcagaagcccgggcccgggaccaaggtcaccgcagcagtccgggcccctgcgttctgagccgggtgcggacgcgccggtagtcggggaagtcagggtctttgacgcctgaaggcgcaggagcgggggtccctgggggagagggtccagcaccgtcacctcccactcctcatccgtgggttggggagcccctgctgtgggggaaggaggctgtttcgtttgtaaactggcggaggagtggcccctgggcctggcaacccgaagagacacgcctgagaccccctgtaatagaaaatctgcactaaaggactttgaagaagtccttgcccagtcgtcttgggcaatatgggtgacctgacccatgaaatttagacagacaccaaacaggacaatagacactaaacaggacaatagacactagggtatatagacaattatgacaatttttatagacagacaaggggtgggggtcccgtgatgggatcagtcagatgcccgcctggccactccccttgtgaggactcaggctcctcttagctttggcaggccggtataaacgcccgttcagatccagctatgctcaatgctgccctaagccttatgaggtcaccacggaaccacaggtgagggcccactcgaactctgtagcttttgccgtggagctacaaactgaaaattcaagcgcgagcccttgacctccacattcactcactcactcacacagagtttattacaattcttcaatacccgttttaaaacagaggtctccttgagacctcaacgagaggagaagagatagagagagagagaaagaaagagactagtcttacagagatgcctgacagaaaccaggactctgtcctccagcatcctggaatttggacagagtcagagggatgccctcatcagagccgcttccctcccagagaaacagagtcagacagaaaccaggactctgtcctccagcgtcctggaatatggacagagtcagagggacgccctcatcagggccacctccctcccagagaaacagagtcaaatctgacttaccttcccgggaccagacactgaggactcaggagttgaatttggttgaggacaccggcagccgatccgttcccctctggaagacggtggcctacacgtccctggaacgtctttaggtggcgcctcccctataagctcgccgtctgtccaggggagcccggaacgggtccagatttcacccggtggcggatctcgctgtggcctccaaatgttgtaactgagtgagttatagagaaatgccacactcttagactaattcaggagtcctttattagccggcgactgagagacggctagcgctcaaaattctctccaccccaaagaaggggctaggtttctttttataccttggtttagaaggggaagagggagccgagctgaagcaattttacagaagcaaaacaggcaagaaagtgaaaaagataaatggtaacagaaaaacaaacagttccaggtgcaggggctttaaatctatcacaaggtgatagacgcgggggctttgggtgctatcaaccggacgaattcctgggaattgtggatatagcttgtcacagtatcttatcagtaatcgcattcttggatgtgctgggagtcagcttaagtccttgaggaaggggggtgggtgagagactgcaagcgaagaagccaaaatagagtctgcctggccctctcagctaagggagagtcaatcacgttaaacacaaggtagggtatcacattggaattacaggcatgagccactgcacccagccgacatcaccatccttcctgactctgaatttatatactactaaccagcaatcattttcctccacctattcaacacagaagtacctaacagtaaaagatgagagatacctatctggcatgtgagaaaatgatatatagctactgacggggatttcctttgaggatgctgagtaaacttcgtggtgtgtgcctgcatttccactgcaatctatcacatgtgatgagttgtggaatttcccacttgtggcatcacactggggctcaaagagtttcagattttggagcatgtttttttgttttttgagatgggagccttgctctgtcacccaggctggagtgcagtggtgtgatctcagctcactgcaacctcaacctccagggttcctgcctcagcctcccgagtagctggggttacaggtgccccccaccacacccaggtaattttttgtatttttagtagagatggggtttcgccatgttggccaggctggtctggagctcctgacctcaggttatccgtccactttgacctcccaaagtgctgggattacaggtatgagccaccacgcccggcctagattttggagcattttgaatttgggatggtgaatctgtactgttgttcctctccccccacaaccatcttgccgatggggaaactgaagcattgagaggtgatggaaattgctggaggtcatatagctggtgagtggcagagtggactcagaacccaggatcatctgattgcaaaatctgtttccttcatctctgtactgtgcaacaatgacaagaatactattggcgataacaacaataacccacaaattttgacttgtcattcacaacaacaacaaaacaataataacaatacattcacctctggggtcgaaacccatatcctagaatcctaggaactaaggattccctccagccacactgcagcaatgctcatttgcatagaccctctaatttgtatgcatatcattatctgcccccacccaacccaccagctccctgtgttttatgcttccagctggcttggcggattgtcattctgtcctggatgtgtctaataagggcgtcttgcgggatgtagcctctacttcctcaggaattgtggattggagaggaagccagatccagacgtgaggtctctggtttcccccacatttcctgcatggacttgagccaactgggtccaggttcctcatctgtagaatgacctccatgggtcattacctccatccctctgcctctaggagccaccacttgttgctgatggttgccccccatccgactcctccctttccctgtggggctctttaggcctgacaattcctctccacccttcttcagtttgttcccctaagaactagacagatccaggtacaactatttgccatttatttcaaagatcagtggttaagaggcccagggttatgaacaaggtctggtcctcaccccgagatgtgttagtctgggctggggagggccctcaggctgtgtgtatatgtgtgtaatgttgtgtgtttgtcattgtgatgtgtgtgtgatgtgtgtgtcattgtgatgttgtgtgtgtgtaatgttgtgtttgtcattgtgatgtgtgtgtaatgtgtgtttgtcatcgtgatgttgtgtgtgtaatgtgtgtttgtcatcgtgatgttgtgtgtgtaatgtgtgtttgtcattgtgatgttgtgtgtgtgtaatgtgtatttgtcatggtgatattgtgtgtgtgtatgtgtgtaaccaggtctgactataacttggtctgtctgtgtctaatgtaatgagtattaattaccaagtgtgacggtgacacctctgggagtggctgtgtagctgggatgctgtctgagttttgtgtgcttgtgttataacatacacacagtgctgtgactgtctgtgatgccgtctgtgacttccatgtgattgtgtggttgtgcatgaatctggcacttcgcgtgtatgagtctatagttgtgaaagagtggctgagattatgcagccatgtgacagattttgtgggatgccataggtgtgactgtagagtcattcttccttcctttcaatcagcaagcatttccctagagcatgctttgtgccaggccctgggccggatgccggggacagatccgtggtgtcctattagggatgtctatgcttggcagtgatgaaatcagccatggtggtagcatttacaccatggaaattggcaaacattacaaagctgtccccctcccaggacagctggttgttaaacagttatgagcacgctgccgtgctcatgtatctgagtgtaactctttgtgaccaggctgaggtgtggccaccagtctgtgggtgggatctgagtatgtggggtggggctgggctcttcatgatgagtcccgatgatcagtctcccgcccaccctgtccgtactcatgatgagagtagggaagtggatgaagtttcccacccccagccaagtccctggaatcccaagccccactttcttctgaatcaaaagcataaatacccacccctcaccccttcttcctgaatatcaggcaaatcaactttaccccatgtttgggggcccacagaccccaagtctctgggtttttgtccttagtattgtccgtggcagggtctgcagtctacgtgggtcttctgaaggtgcctgctggggcttcatctcgccttggtggtgcccactgagctctccgcctttgagttttgggttccctggagtgtcccccaagatctgtttcctgagttttcttttttcttcctttcttttttttgaggcacagtctcactgcgtttcccaggttggagtgcagtggtgtgatctcggctcactgcaacctccgcctcccgggtttaagcaaaattatcctgcctcagcctcctgagtagctggattacaggcaggcaccaccacgtccggctaatttttgtatttttagtagagatggggttttgccatgttagccaggctggtctcgaactcctgacctcaggtgatccgcctgccttggcctcccaaagtgctgggattacaggcgagagccaccacgcccagcctctgcttcgtgagttttctttcccctgaggcaccctctgagttctccacgtgtcagacccatgtccaatgcaccacgctccttccttcacaccatgaaagccccgaagtaagaccgggtaccatcacgcagtcgaaccaggcgttcatccagcacacggacgaccaccttctccccagcctccaggtgtaccacaccacccaggaagctgctgtcccaccagacccgggagctgctggtggcccgtccgcagggtgactgctggctgaccaacagctccagctcctcggggtagcggggtgtgcgcttgtagaggccgtgggtgatggtgctggccaggcccagcgggcagcccacaccgcccagctgcaccttggagtagatgtagtagtagccagctttggtgaccacaagggccccatcgtggtagctgaggcccctcaggaaggccaggcccagctgagtctcccataacagcggccccccgctgccggtcaagctggagttggcccctgttgggaagagagagacaaagggggctgccggtcagcacatgtcttcctctgttgcttgtttgtttgtttgtttgacacagagtctcgctctgtggaccaggctggagtgtggtggcatgatctcggcttactgcaccctccgcctcccaggttcaagcgattgtcctgcttcagtctcctgagtagctgggactacaggtgcccgccaccgcacccagttactttttgtagttttagtagagatggggttttgccatgttgctgaggctggtcttgaactcctgacttcaggtgatccacccgcctcggcctcccagagtgctgggattacaggtgtgagccaccacgcccggcctcacatgtcttactcctgctgtgtgactccaggccagtcaccactaggctgtttgtgtgtgtgtgtgcatgtgtgcgtgtgtgtgtgtgtgtgtgtgtgtgtgtgtgtgtgtttgtagaggtgggggtctcacaatgtggcccaggctggtctcgaattcctgtgctcaaccgatccttcaggctcccaagtgctgggattccagtcatgagccaccaccctgcctagcctgtttgtatgtattaatttgctttatccctgctttgcagaggagggaaactgaggcacagggaagcaaattaacttgcttagtctatatctcaactctttgcatccctcttttgcaggtggggaaactgaggcatggaaccgttaagtgatttgccaaaagtgtcaaaacttggctgggtgtggcgtctcacccctataatcccagcactttgggaggctgagacaggaagatcccctgagcccaggagtttgagtccaggagttccagatgaagtaacatagggagaccctgtctctacaaaaaacaaaaaaattagctgggcatggtggcaggcacctgtagtcccagctgctggggaagctgaagtgggaggatcgcttgcacctggcaagttgagggtgccgtgagccgtgatagcaccactccagcctagttgacagagtaagaccctgtctcaaaaaaaaaaaaaaaaaatgtccaaacatgcaagtttgcaaaaccaagaaaccaaagcggcacctcgtactcgctgtgtgcctcagtttccctctctgtaaaatgcgcatattaatagcacctgcttggaatgtaatgaattaatatgtagaaagcgtgtcacagcacataacacagcataagcactatatgagagttcattaaattaataaaactaggccgggcccggtggctcacgcctgtaatcccagcactttgggaggccaaggcgggaggatcacctgagatcgggagtttgagaccagcctggccaacatggcaaaaccctgtctctactaaaaatacaacaaaattaaccgggtgtggtggtgcatgcctgtaatcccaggtacttgggaggctgaggcagaagaatcgcttgaacccgggaggcgaagactgcagtgagccgagatcatgccactgcaccccagcctgggcaacagagtgagactgtctcaaaaataaataaataaataaataaataaataaatagaaataaaaaataataaaataaataaaactggaaatacatagcacttgcagcctatgttctgagcaactctgtgagtaaataagcaatgaatgaatgaatacactgatatgtatggcgtttatctggtcttcccgagacgccctgacccctgccccttgccaggatccagggtccctctcacctgtgagatgcgctgctgggttgacctcgtgagaccttcgctctggggaaagagggtcagaggttagagacgaagacagtggaggtaaaaagccagcctcctaaagggccaccgtgtacacctcctggaatcaaccccaccccttccggagtgacccaaacttctgcttctcaggcctgggggaggggcacctgtgaggatttggccagttgtgcaaatcatattgggcaattgaccgaggggtgggggtggcatgggaatcatcacacctccttccctggggccaggaccctgactcaccttgtatcagctgctcccaggagcctgcaggtccgtcctgaaaatgcagaaggggcctgcggtaagaacctgcagcgggggccacgccctcgcattgctcacacatggctatgagacatgaggaccatagccaccgacaccaccctcagacacgtacacagggccacatactctcacttgcagacacacaccccctgtccagaggcctcacaaccacttggtgcctcagtttccctctatgtaaatggagttacgaatcgtgtctgcttggcgtttaatgaattcacatatgtaaggcattattacagtgcttggcacatagtatgcactagagaaaggtttaataggtcgggtgcattggctcacacctctaatcccagcacttcgggaggccgaggtgggcagattacctgaggtcaggagttcgagaccagcctggccaacacagtaaaaccctgtatctactaaaactacaaaaattagctgggcctggtggtgggtgcctgtaatcccagctgctctggaggctgaggcaggaggatcgcttgaacctgggaggttgcagtgggcccagattgtgccactgcactctagcctaggtgacagagtgagattctatctcaaaaaataaataaataaataaaagggtttaataaataaataacattgcccagagcagtggcttacacctgtaatcccagcactttgggaggccaaagtgggaggacagcttgaggccaggagtttaagaccagcctgggcaacacaacaagacctcatctctacaaaaaatttttaagattagccaggcatggtggtgcatgcctgtagtcccagctactcatgaagctgggacaggaggcttgcttgagcccaggagttcaaggctgcagtgagctatgatcgtgccactccactctagcctgggaagcagagtgagacacagtctctaagataaataaatatgtaattaattaaataaataagtaatatttaaaaatacagggacaaggccaggcgtggtggctcacacctgtaatcccagcactttgggaggctgaggcaggtggatcacttgaggtcaggagttcgagacaagtctggccaacatggtgaaaccccgtctgtactaaaaatacacaaattagccaggcacggtggcggatgcctgtgatcccagctactgctcaggaggctgagacaagggaatcacttgaacctgggaggtggggttgtagtgagccaagactgcaccactacactacagcctgggctatgggagagaaaccttgtctcaaaaaaaaaaaaatgcagacagcgagatggctggacacatggacaccacccttgggatatagcacctgccacagggcacagacctcaacatcatcatgacgctgagaagacacatgtgggctcagatgcgtggacatgtggtttgtggtttatggatccatgtgcgtctacagacacagagacccagagacaaagacagacaacgtgaatacaccggctgcagctaggcgggtgtgtggacatgtgggtacacgcacatacgtccacatgggtatatggacacgaatgtgtggccaccggatccagacccaggacacaaaaggggccaagcccacaggggtatggtgttgggcacacatagacccccaggtgaggcacacagacaggcggacacatccacagccagctggaagcagaccgagaaatttccacagatggaaatggtcagagaattaatgacaatcgcagtaacagtaataagagtaccagagaaggccaggcgcagtggctcacacctgtaatcccagcactttgggaggctgaggcgggtggatctcctgaggtcgggagtttgagaccagcctgacaaacatagagaagccccatctctactaaaaatacaaaattggccaggcgtggtggcgcatgcctgtaatcccagctactcgggaggctgaggcaggagaatcacttgaacccgggaggcagaggttgcggtgagcagagatcatgccattgcactccagcctgggcaacgagagtgaaactccgtctcaaaaataaaaaagtacagagaaaatgcatgcgtgtgtgcacaggggtgtgcatggcagtgttggggtgtcagttccgacgggtggagctggcatcgtctggtactacacatgccatagcatacttcgtcccctatgaagagactgcccttattttgtagatgaagacactgaggttcagagaggtgaattcacttgcccaaggctgggagcagcaaccagtcaagccagctgctctcagcctgtgccctgtcctacacacacacacacacacacacacacacacacacacagacacacagtgacccacaatgacacaggggagcccccctcacctccacctgctctcagccccccggtcccactcacaggcaggcgggtgaccatctctcctagacgccagtgcagctgcaggaggaaccagccttggacggccagcccggcccccatcagcaacagcaagagacccagacccacccgggccacactgcacgactgtctccggtggcttcgtcccagcctcgtgaatgggatgtcggtctgtccatccaccacaaacactgagggccgtacgacactctcctccatgcccaaggtgtctggagcagggctgacacgcctgggtccttcaacctcagaggaaaccgaaattgctcaacactcctgggctgtgcacgctgcggacaggcacccgtgggccgcctttagagctggggttcagccccaccccttcccccactcaccctcctcttcttccggtacccgccgcccccggtcttggccctgtctcactctcactcatacagactctcacactttccagaggcttctgaaaatgtgactcaggtggcaagtgcagtggggagcccccagctttcccttcttggatgcttcattcgcttggggccaccaaatatcgactgaggactttctgcccatgccaggctctgctctcggtgtgggggatgcagcaatgaacaacagcaagaagggtccctgctcctcttctggtggagccagagagacaagaaacctcgtaaacaagaaaataatacgttgtgggtttttttgttcgtttatttgttttgtttttgagatggagtctcgctctgttgcccaggctggagtgcagtggcgcgatctcagcttactacaacctccacctcctgggttcaagcaattctcctgcctcagcctcccaagtagcggggattacaggcgcgtgccaccacgcctggctgctttttgtatttttagtagagatgggttttcaccatgtcggtcaggctggtctcgaactcctgacctcaagcgatccacccacctcagcctcccaaagtgctgggattacaaacgtgagccgcaccatgcccggccttctgttgtgttttgatgtgacaagtgcagtgaaaaacacaagagtggaataaaggagtggatgtgtgctctgtgtgtgtgcttgtctgcatgcatatatgtgtgcagtgtgtgcatgtgaatgtgtgtattcagttgtgtgcatgcaagtgtgtatcatgtacacatgtgcaggcgcatgcctgtgtatcatacatgtgctggcatgtaaatgtgcgtgcatatgtgggcaggtgcatgcatatgtgtatggtcatctgtgtgcatgtgcatgtggtccatgtacatgcatgcatgtgcacgtgtgtgtatgtgtgaacatgcatcacatgtgcaagtgggtgtgcatatatgtgctgtgtgcaggtgtgtgcatgtgtgtgtgcctgtgcattggtgcgtgtatgtgtgtgtgcgcacttgcacgggtgtgttcatgtgtgtggggaggtccatgtatgagtgtgcatgcattcaagcgtggatttttttttttttcgagacggagtctcgctctgtcgcccaggctggagtgcagtggtgcgatctcggctcactgcaagctccgcctcccaggttcacgccattctcctgcctcagcctcctgagtagctgggactacaggcgcccaccaccgcacccagctaattttttgtatttttagtagagacggggtttcaccgtgttagccaggatggtctcaatctcctgacctcgtgatccgcctgccttggcctcccaaagtgctgggattacaggcataagccaccgcacccagcctttttctttctttttttttttgaggcagagtctcactttgtcacccaggctggagtgcagtggtgccattttggctcactgcaacctctgcctcccggattcaagcaattttcctgcctcagcctcctgagtagctgggattacaggcgcccaccaccatgcatagctaatttttgtattatatgttggccattatatatgttgtaacatatatgttgtctatatgttggccaggctggtctcgaactcctgacctcaggtgatctgcccacctcagcctcccaaaatgctagaattacaggcgtgagccactgcacttggcttctgtcttgtttcataagtatctttgtaatatccttgattttacctcttggccctgaaagccaaaaacacttatgtggccctttatagatacagtttgctgccagcttgcccctgagcttaggctaagacacgaagtgcccttcactggggcctctgtggttggaccctcgtgcttttgctcactctgccccagacagatatcctgggtctttgcacttcctcttcctgctgctgggaaccatcttccctagatctccaaagcaggctccccctgctcatctgcgtcttgactcaagaaacttctcacaggagccctccctgaattggtcaggtgtctcccgagagacagaaccaatagaagatacacagagagatagagatgggatctataggctgggtgcggtggctcacgcctgtaatcccagcactttgggaggctgaggcatgtggatcacctgaggtcgcgagttcgaggccagcctggccaatatggggaaaccctgtctctatcaaaaatacaaaaataaaaaataaaaaattagctaggtgtggtggcacacttctgtaatcccagctacttgggaggctgaggctcaagaatcacttgaacccgggaggcacaagttgcaatgaactgagattgtgccactgcactccaggctgggcaatggcatgagactgtctcaaaaaaaaaaaaaaaaaaagagatctgtagagacagacaaagatacagagtcagagaagagacagacatggaaaactagagagacagggacacagagatacaaagacagacggagagagagagagagagagatgtatagagtcagagagagtgtgtaacacatttattttaagaaattagctcacacaatcatgggagttggcaagtctgaagtccacaggacaagccagttaggctggaggctcaggtaagaggtgacactaccgtcttaaagcctaaagcctggaaactcaggcagaattactaagttgcaaccttgaggcagaattccttcttcaggaaacttcggtgtttactcctcagaccttcaactgatcaggtgcggcccactcacattacctaggctcatctcctgtcctgaaagtcaactgtggttgttgacatgatctgaaaattacctttctagccaggtgcagtggctcacacctgtaatcccagcacttaggggggcagaggcgggaggattgcttgagcccatgagtttgagacctgcctgggcaatatagtgagaccccgttctcaacaaagaggaaaaaaagaaaaaagacaaaaaagtaaagaaatataaaatacttttctttctttctttctttcttttttgagacagagttttgctgttgttggccaagctagaatgcaatggtgcgatcttggctcattgcaacctcagcctcccaggttcaagcgattctcctgcctcaccctcccgagtagctgggattacaggcatgcgccaccaggcctggctaattttgtatttttagtagagatggggtttctccatgttggtcaggctggtctcgaactcctgacctcaagtaatccacccacctcagcctcccaaagtgctgggattacaggcgtgagccactgtgcccggctaaaatacctttctagcaacatttagactagtgttttaccaaatgacttcatatagcctagctttgttatcacataagttagccctcatgccactcaatctaagtgatcttcttaaccgctggacccactgcatgggtgaacttttctttttggacatcctcaccatccaaaatccattccacactgtcttctttttgggggagccggtgtgggggatggagtctcgctttgttgtccaggctgtagtgcagtggcccgatctcagctcactgcaaccctccgcctcccaggttcatgcgattctcctgcctcagcctcccgaatagctgggattagaggtgcccgccaccacgcctggctacttttttgtatttttagtagagatgaggtttctccatgttggccaggctggtctcaaactcctgacctcaaatgatctgcccacctcggcctcccaaagtgctgggcttacaggcgtgagccaccacgcctggccccatgctgttttcatgagtcctatcctgctcccccttttagaatgtaagtttcataagatcctatctgcaccgttcacagcctcaagtgataggttttagctcaaaataaaagcaaacacaaacaaaagcaccaaacacccccatatgttgaagaaatgaatcaaatgaatcccaaacaggagaaagggggagtgaaggccaggtgcagtggctcatgcccgtaatcccagcactttgggaggccgaggtaggtggatcacctgaggtcaggagttcgagaccaacctggccaacatggtgaaaccccacctctactaaaaatacaaaaattaactgggcgtggtggtgggcacctgtaatctcagctacttgggaggctgaggcaggagaattgcttgaagctgggaggcggaggttgcagtgagccgagattgtgccactgcactgtagcctgggggacagaaaaaaaaaaaagagaaagaaaagaaaggaggaatgaataagaaaagaaaaaagaaatgagaagaaggatgtgaagtagagtggtggtcttggcagatatcagccgggatagccagtgagttgcaaggcatttgacaggaggctttgtcatttaggagctggatggagtagggtagactgtgaatctatttcgcccatacccctggagttgtggggtgtcttaggaaaagaggctgtggaggcgtgactttcagcctcagtgggtgtttcgtgatgatgtggtgcagagctgggaggctgcatcccaccctccatacagacaccttcccagtccccaaaggaccagaggtgcagtgagaggaggtgctcagggccccagtcccctttagcaacagcgcccctgctctccaaacccaaggctgctgctccccaagcagcgctgtcaccagaaagcactttgtgtgccgtgaccacaaagcccccgcactccctccctaactgctgactcatgtcttcccctccctggggctccagccggaaacactgccctgcctgccagcccctactgcctcctctcgggttcagtcaccagacacagctcaccccaaagcatggattcttggctcaggcccatctagaaacggggtctgggagagtgaggtgaggctgcaggagggcagaagggatgcaaatgaggacaggtaaggatgcaggtgagagggcagagcaggtctgcaggttgatggtgatggcgaatctacaaggacagatgccgggggaggtgcaggtaatgaaaccgcttttgcaaaatcataactgaggaaattatgacgctgaaagaaatcagacctaagcgtctccgtcttgcttctaagcttcaagctgtccttgttctttcctgggcataggccgaactaactttgggaaggaattcagttcatggtttggctctgaaacaaaattggtaacagccctttcccgaaaagaccccctttttgcctggggaccagtctgcctttgcaggactgacaaattagctacaagattagaaattacagtttaggggccatacagcctctggctccaagagtctgaacctccccaaattgctcctggggacaacatcactattgtaaaacctaagatcagtgctccagatatgttgcagaccctgaactcaatggatcagctgacaccatcgagaccagtaatctgacccctccagttctgtgatcccacccaggaacggaagacagaaaacctcacctggaccccctatgattccaacttcaacctcaccaatcaacactcctcacttcccaaacctctacctgccaaactattattattattattattttgagatgaagtctcgctctgtcacccaggctggagtgcagtggcgcaatctcggctcactgcaacctccacctcccgggttcaagcgattctcctgcctcagcctctcaagtagctgggactacaggtgtgcatcaccacgcctggctaatttttgtatttttagtagagacggggtttcatcatgttggccaggctggtctcgaactgctgacctcaggtgatccacctgcctcggcctcccaaagtgttgggattacaggcatgagccactgcgtctggcccaccaaactatctttaaaaccgctgatccccaaatgctcgaggagactgatttgaataataataaaactctggtctcctgcacagcttgttctgcacgaattactctttctccactgcatcccccgtctgataaatcggttctgtctaggcagcgggcaaggtgaacccattgggcagttacagtaagaagataggtaaatctgcaggtgagaatgtaggtgagaatgtgggcaagaacccaagaaaatacctagaaaagcatgcaggtaaagatgcaggtgaggacccagatgaagatgcagagaaaatacactcaccggagaggatgtaggtggaaaaaggtgagaatataggtaacaatgctgttaaggtaaagatacaggtaagcttaagatagagatgtaggtgttggggccaggtgaggatgctaaaaaacaaaaacaaaaaaccctggcggggcacggaggctcacgcctgcaatcccagcactttgggaggccgaggcgggcagatcacctgaggtcaggagttcgagaccggtctggccgacatggtgaaaccccgtctctaataaaaatacaaaaattagccaggtgtggtggccgtgtgcctgtaaccacagctactcgggaggctgaggcaggagaatcgcttgaacccaggaggaggggtcacagtgagccgagatcgcgccattgcactccagcctgggcgacaagagtgaaactccatctcaaaaaaaaaaaaaaaaaaaaaaaaacagaaaaacccacaaaaacaaaacaacaacaacaaaaacccatacatggattcagctgagggtgcagaggagtgagcaggtaaagattcagatgaaaatattggtaacattgggagcagggagaacattagggaaaagacctaatgcatcctggacgtaataactaggtaatagggggctgggtgtgatggctcacgcctgtaatcccagcactttgggaggccaaggcgggcggatcgcttgagatcaggagttcaagaccagcctggccaacatggtgaaaccccgtctctaccaaaaatacaaaaattacccaggcaaggtggcgggcgcctgtaatcccacctactcaggaggctaaggcaggagaatcacttgaacccgggaggtggaggttgcagtgagccgagattgtgccactgcactccagcctgggcgacagaacaagactctgcctcaaaacacacaaacaaaaaacctaggtgatgggttgataggtgcaggaaaccaccatggcacacttgacctatgtaacaaacctgcacatcctgcacatgtaccccggaacttaaaatagtaataataataaaataaaaaaaaattggtaagattaacaggtgaggatgccggtaagtgaagaggtgaaggggctgtgagctgccggtgagtgtgcaggtgaaatggaggtgaggcgcaggtgcatgccacgtgcaggtgaggcaggtccatgctccttggctaaagaagtcagcacactagcaggcgaacgccaggagaaaatgcggtgggaacaggtgaggtttcaagtaggatggagctgagctgcaggtgaggcggctggggatttcagcctctccctcttggcaaagaactccagacacgtgagatataactgaagctttatctggagtgggggaatgggggtgtggtcagttggggcacccaaagacaaccatgctctcggtgaaggcgccgaggtcctggcattgtttctggttctcttcgtcttggcattcgtcctcctcgggccagtgctccacccaagtgtccttcccgatgatgtagctgaggctggagggaagaatggcaggtcaggaaggggcgtggtgtgggcgtggcgcaggggcgtgacaatggtgtgggcgtggcatgggcggggcagtcgggcggtcgcgcgcacgcgcagggaaagcactcacttgggcttctctccccagaaatcggaggagagaccccacatgaggtagtgtttcttctcctccagcttcagggcttctctgcacttgatggggctgatgaacgtgcgctgctgtccaacctgcacctcatccgagcctggagtggaggggagagggaagaagctgagtcgtggggaggaagccagggaagagccacgggaggcagcgtgctgagcctgacctgacttgatggtctgctcaatggccatgatgtactcgtcaaagtcattggacagctgaaccttgaccagtcgggtcttgtacactgtgggggagaggcagacagtttgggtggtgggctaggttgaccatgaggggcaccctggtttgcaagtgcacccgggcatgtggctctctctcccaagcagaaagttgcagaatcacagccagtcacactatggcccacccctcattacacacacaaccatagagggtcccatgtcaccatccacacacagtcgtgctcataggcatgcacagaggtcacagccacccacaatgtctagtaacatactattcatactatgcaatgagagtgactcatatgcacaaaatactgtagcctcatggccatgcacacaaccatagccacggaaaactacagtcatatacgtaacttcaggacctcacactcactgccatctacaaccacacagcctcacacaaccacagccacacacaactacaacctcacagccacccacgcaatgatgcatacaaccacatctaccttttctcacatgagcatacctaggccactcacagtcatggttccccacacaatcatggcccctcacaatacatgctctcacacacaccacagtcacccacacccacagcctgaagccacaccatgacaaccacacctaccacccaccacacaattggacacacacagctaaacatgcgtgacccccacccatcacccactcaccatagtccactcctggctcacaggccttgtccagccgttcttccagggtgaccttgtcatccgacttttgtatgaagcaattctctgcagggtggggtggagacagggtctaagtcccactccttatctggggcctactgcccatgggtgtggccagccctgggagcctaccccccttggtatcccctgggtatgggtctgggggtccctgaccatgggatagatgacctgggtaagtgtggcttgctcagacccacctgttcccggctccagggaactcaccctcagcacagcggcacagttcatcacggcagagcttgttcagctttccatcctccttttccggatggtagaaccgggtacagctttcctctgcgggcagatgtgatgtgaagatgagaggataagggcctccctccaaagaccatgcctgggaggcccagatccccagttctcagtcttcagacctggagatgctaggtcttcaacccctcagatccctcagaccccaagaccccctctactttctgatctttgggattctcagacccttgagtctcttagactctcaactcacagaagcctgggaccctcagaccccaaattcatagattcctgggacacgcaggcctccaaccctcatatatctagaatccttagacccttattttcagaaccccctgcaactcacatattcctaagaccctgagacccctgaacccatcagacccccaagtctcagatccctagaaccaactcatagatccttgggactctcagaccctgggaccttcagattactaatcctgaaatccctggcctgcttagaccatcattctcagatcccctcagaacctcagaacctcaactcatagatccttgggaccctcagacccgtgggaccttcatactacgaatgctcaaatccctggactccttagaccttcattctcagatccccacaattcatatatacctgggactctcaggcccctggaaccatcagaccccaggccctaggttggctgctcacccaggttgtaataggcgtagaccttgactgctccaggctggataagctctacattaaagtattggtgaactttgaaagctagacagtcatcctcagagtgtgagacctgagggggaaggaggagcttggtcagtggggtgatgtgggagggagtccagcattgtcttgggagctgaggcagtggtggagaaactgaaggatcaaggaggaagtggcaaagatgaatgagcaattcagcaaatccatttacttttcttcctagactcacagtgagactacctttctcagctcctctttcaattaggtgtggccaggtggctgaacagattgctatctatgcccataaaaacaacccatgcacaatcttatttccatctagaatgaatgaatcctgcagagaactacagaagatcctaaggattgcagagccacaggatggaaggtgcttggatccctgagagactacatggagcagagggacccttccttaccccccatgccaactggactttacatgagtgagaaatacaagtctgttgtgttaagaccccatattcttaggggttttgttttagtagctattgttacttaagctgactaaaatgggattgaggggccctgtgggtatcaggagttagcagggaggatatggggataggagaatgggaagaaataagagaagggagaggagaaagcccaaatcatggtagagatgaaagagtcagagaatgccagatggagagaaaataacagaagaggtggcaggtgtggtggctcatgcttggaatcccagccctttgggaggctgaggcaggaagatcgcttgaggccagtagtttgagaccaacttgagcaacatatcaagacccccatctctacaaaaaataaaacaatcagctgggtacttacacagaatatttatgaagaaacaagaacaaaaattcagctggggccaggcaccaggggcttatgcctgtaatctcagcactttaggaggctgaggtgggagaatcacttgagctcaggagtttaagaccagcctaggcagtacagtgggaccccatatctacaaactttttttttttttaattcactgggcatggtggcatgcacctgtaatcacagctactcaggaagcagaggtgggaggatcatgtaagcctgggaggtcaaggctgcagttaaaaaaaaaaaaaaaaaaaagctgggtacaaaagcataatatttatgaaaaaaaaattagctgggtgcagtgtcgcaggcctgcagttccagctcctcaggtggctgaggcaggaggatcccttgagcccaggaatttgactttgcagtgagctagtatcaagacactgtactccagtctgggtgacagagcaagaccctgtctcctgaaagaaagaaaacaacagaagagagaaatagatcaaagaaagaaacaaagcccaggattgggttagggaacgaggcaagaccttgctctctacaaagcacttaaaaaaaaaaccaaaaaaaccaaaagggctttttttcaatggttgtttaagactctgataacaagttggaggaggcaaatggtcagaagatgagatgtttatagaagatgctgggttgacccccttattttacaagctccttcccctacaactcagcagcacagaccctgtctcctctggcccagggttagtctgacccagagacaaaagctgaaaggaaaagaaagaccagccagatagaggtcagggtgcccctggaagcctcccaggggaggatgatgcagccttaccttgtccaggtagatgatgagggtgttcctatcggagaaggctttgtccagctcatacttggagatgtatctgtcaacaccattggccagctggggaaaggtggagcctgtgaaaaatccctcctggacccctctctccctgcagcctcttccagaacccaggctcctttccacttatcccagctcctgagcccttcatacctgcttcaggtcatctgtgtctggagcaaagccagtcatcatggatatgtccaatatagacatagtggcatcctggtctccccggtacctggatagtgcagaaagaagggcattgggtcccaaggaggggtcagccccaagggtctgttcctggacaaggaggtctgatcaggcactgagacttctgattcccacatagcagcacagaggggcgttacattttttaggaaacatttccccaaaggaaataaaaagcaaggtaatgtaatggtcaaggtgattaagagctcagactctgcacccaactgcatggattcaaattccagctctaaataacattggatgcattatttgaccctccatgcttcagttctagaaaacaaggcaagaatacaggcagccctcactctgcatgattcagttaaataacactagtagcccagtgacatggttctttttcagtaccttggtatattgatcacgagtagttgcatatggtataaactttgttgctaactcttcagtctagaaatcacgacataaataaaagataagcatcataattgagggccaattactgtcactcctttcaaagtccatcagtgattggtcactgagcttctgctcttcaatttatgcacagacagcaaagtgtgtagttctgttgcctccctgtctccaggtggctaactcccatgagattttacaacaatgtatcacgaaaagagggaactggccaacaaagataaaaatgcagcaaagaaatgaaaagtgataatgccagaagtgaacttcaaagacagcataaatggagttatcaaagaatagcagactatggtgatgttgaccctgctgccatttgagagataggtagtgtagaggaactcagggaaggcaaatgtattagcataaataaggaaggtcatggggacaaaaaggatgaagatgtcccagaggaagggacattatagaatacaaagtcactttaaaggaactcttggaggaattttgtgtcatggaaagctcaaaggataaaatattggaagctgatccaaacttagaaaggagcaagacaaggtactaaggcatagaaaagatgtttactccatgttgtaaattatacaaagagaagaaggcaagcatttttttgaactaaagtactctccgtaagtgtcatacaaaggaaaaaaaaaacaacaaatacaccttgcatctcaatgttctaatgttttaaattacggtgtagtcaaatactcatcttactatgaatttcatttccctgtatctttattttgttttattctattttttttttttttttttttttgagacagagtcttgctctttcgcccaggctggagtgcagtggcgtgatctcagctcactgcaagctccgcctcctgggttcacgccattcttctgcctcagcctcccaagtagctgggactacaggcacccgccaccatgcccggctaatttttttgtatttttagtagagacggtgtttcaccgtgttagccaggatggtctcgatctcctgacctcgtgatctgcccgcctcagcctcccaaagtgctgggattacaggcgcgagccgccacacccggccatttccctgtatctttataactggcagtatgataattttaaatgttgtaatagaaacatttaggctgggcatagtggctcatgcttgtgatcccaaaactttggcagcccaaggcagaggaatgctcaaggctaggagttcgagaccagcctgggcaacacagtgaggccctgcctctagaaagaataaaaaataaaaatcagccaggtgtcatggcacacgcctgtagtcccagctacttgagtggctgaggcaggaggatcgcttgagccagggagtttgaggttacagtgagctatgattgtgccactgcactccagcctggctgacagagcaagaccctatctctctaaaaagaaaaaaagaaaactttaaaggtcatggaatgattgtgtactttcctccattgattactaagatgctttgacagtctcagcttacgtggtcattgctgtggtctcacattaacatgcaaagcaaggactgtctgtgttgtctacctcatggtggatacttagaacagtatcagatacacagtgtacttggaaagtactgaatatcatggatattatttgcaagaattcttgctagagatagagggatggccaagatgaaccccggtgacctagcttcttacctggtacagatctcaaggatcatagtgttcttggcatcctgaggcctcttttctagaaacacagaagagagaaagatgggagagggtatacctgtgtgttgattcaggagcggggaagacattagaagaggggtaggaggaaggtgacagataaggccttgattccttttacctgtttccggtgctggttttatggtgaccttgaggtcgaatttattacaggtgagttgatctttggccttagcatggtacattgtcaccacctggtaagatgggagaggagacacaatgtcagcccacaggactaggactgctggggacaagaggagatggtccctctggggcagaggggcatgggccaggcaggtgtgggtttctgttccttaccgacaaggtgccttggccttttccttcagctgtgactgtgaaaccctcattttccttggtctgcagagtgaaaagagagaagagagcatgttgggaattaagccttctgctgcctgtgatggtcacctggccctccctcttgcttcccagtaaaccctggctagtgtagggggagacagccagagtgaggagggcttggctgggtgactgtacctcttctgatcgcaggaggctggcagattcccagtggatacggtgggtgatcttggagctgcggctgggcagttggagggacacatcaaggttcagttcctggtggtcaggggcgtccttttggtattgagccaaggcttggaacaccatgaaggtggcctagaacccacaagagagaaagatggtgatctgggagcctgggaaagtggctagaatccagtgggggataaagaggttcaaatcagagctgggacatcaaaatgtggcctagaacctactagagagtgcaggggtgataactggaggtcactggactctgaggacatgttcagaactctccgagagacagaaacttacaccaggacttggagatgctgagaacatgtctagaatccatcagaaagtccaaatgtaagactgaatgtctagcgaccctgaggatgcagtctagacccatcaagaggagagagtcttagaccagggcttggagacactgagaatatgtctagaacccactcatgaagaacagaatgaaaccgtagccagaggatactgagcatataatctacaacccaagagtgacactgtaacactgagaacgtgagtgacagaccaccagaaagaaaggaggccaactggagcctgaagttgctgaagcctgaagttactgaaaccatggcctagaagagggtttgcgtaatgccccagggtaactgggaacatactatagagcccgccagtgaggcaatgtgacattgggagcctggtagaactgggaacatggtctagaacccaccagcaagacagggtaagattgtgagatagaactgggaacctggtctagagcccaccaggtggagagagaggcttagacctgaacctgggccctgagaacatgatctagacacctggggcaagaagaaggctcaacacacagcttggagtacccagattgtattctagaacctatagatgggtttgcaagtaataaaaactgattctcaactccactgcaatcacactggctcgtgggaatgaagaactgcctcgctgggcctcagtgtcttctctaggaggccagtgggaagccgcaggagacagggatgcatgtgcctaggggctgtgggcccacttgcctgggtagagccatagccaccaccgtagtatctctgttcattgagccaacgcacgacgggaggcacaaagtcaaagtcttttagctgcagtagggccaagagggcataggatgtggcctccacgttgtagagctgcttaccagggtcctcccagcggttcttatctgcaaagaagataccccatccccagtgctcactgctctgtccagcctggggatggctcagagaaagctcagaaagagatgcatgctagacttcctggtgtttgggtgtcctggctgacattcgaggctctcaattacttggctcctgccttacctctcttgtttcatcaactctcacttctccctttgaaatgaatgcttaatacgcatttgttgaataaatgacgcaacaaactttctcgtgtggtttacaatgaggacctgcgaaaacttagagccgtgcatcccagctcagctcagggttatgcatcccagcttgataccttaggactatccatctcagcttggcttagggtcatctgtcccagctcagctaaaagccatgcatcccagctcagtatctcccgccctgaacttcagccatgcatctcccttcacccctccaggccaaccctcacctttggctgtggtcagaaatttgttaagaagaggccccttcagcctgcccatctgggccagagcatagccagcaatggccacagtgtaggatctctgtaggttcatgtagttggcttcaaggaagtctcctgctttagtgatgctgcctggcaggctctatgagaaagaggatcagattctccggtcatgtgggcattgctgtcacgttagtaaggatcattcgagcagcacttcctgagcatcagggatttctgtccttgggacacacctgtcttagatttgtccatttttgagaatttcccagatattttagccaccatgagctgccttgttgctgcatatctattatgtatctggagaaatccacgtaccccgtggtgtgctggtaaaagtttaacagccagctctccagtgggagggttgagggatccttggtttataatgatttacaatttctgtggtgtaaatactcccaccaggggccaatttcacggtgtcaatgcgacatcactgaacaaagtcctggggagacattctccaaattgttactcataaactagtatgcgccagattcagtataccactgtgaacacctcatccagtcatcatcatcatcgtcatcatcatctttatcttcttcatcatcatagctcacacttactttgtgtcattcagatacccacacatttaatctcataaaacctgatgagcatactgagccctgagagatgcagtaattttgcaaagaccacctaggaaataagtggcagagttaggatccaaacacagccttctggggatgggggaagacatgatttgtactgttttctcatttccatgatgtaaatacttccatcactgatttcaacctaccaatatggtgtcgttgaatgtagagttgggaagagctttgcagtaccacagtattatatagtattttcactatacagatccaacagacataagtaaccccaagagtatagattatgggagtaaggcgtttaggaagcgatgagtttgagtgtttctaacctttgtgtttaatataatttatttaactgtaacttttataactttgtttgtttggttggttggttgggttttttgttgttgcttttttttttttttgagacggagtcttgctctgtcgcccacgctggagtgcagtggcgcgatctcggctcactgcaagctccgcctctcgggttcaagtgattctcctgcctcagccttcccagtagctgggactacaggcgtccgccaccgcgcccggctaattttttgtatttttagtagagacggggtttcaccgtggtctcgatctcctgacctcgtgatccgcccacctcggcctcccaaagtgctgggattacaggcgtgagccaccgcgcctggccttttttttgagacggagtctcgctctggcccaggctggagtgcatggcgcaatctcggctcactgcaacctccgcctcccgggttcaagcgattcttgtgccttagcctcctgcgtagctgggattacaggcgcccccctccaccatgcccggctaatttttgtatttttagtagagacggggttttgccatgttggccagggtggttttgaactcctgacctcaggtgatctgccggccttggcttcccaaagtgccgggattacaggctcactgtgcctggcctaatatttagtttttaataataattgtatttaatgaccagcttgaaaaattcctggaaatttaacactgggctccagcaagctagttatagcacactttttttttttttgaaaaggagtcttgctgtgttgcccaggctggagtgcagtggcgcaatctcggctcactgcaacctccacctccctggttcaagtgattctcctgcctcagcatcttgagtagttgggattacagcacactcttgaccccaggagtctggtttcacagcctgtgctatactctgctacaatgttgctatgttgtagcagaaacaaatctcttttattcctgcccatttgcctctctgacatccactccttttgtaagaacttcttctcccttccattcacgtggccacagtggaaacagccatgtctgccccctgagacctacttcctgtccttagctgattggtccagatatagtcatctgacccaggctgagccaatcagagtcctttcctgggaatatggcggccctaaccttgatctgatattttctctaaggaaggcagccatattctgcctgaactgaattattggccaagaacggaatgaagatcacgggagagaggagcaaagcatcctggcagagtccctgaggccaccttcatctctatttgatgccttggtgcctgcacataaattccccatcaatttttgtataatctgggtcacatgtgtgttatatctgggacaactcagaggcctaaaaatacagagatcgttatttattatccccaatttacagatgcacatcctgagtgaggctcaagggtggaagtgcccatgagtcaggatttgaagtcagatttgtctgaccccacctctcctctctctctctctctctctctctacctacctccctccctccctccctccctccctccctccctctctctctctctctctctctctctctgccttggtccctcttgggtgttagaggcaacagccctgtgtttgtttttctcttcactggcccctcccctccatctcttttcctaaggggggagaagccactagctgagggtggaatcctgggcttcccacttggaaagctaaacgttaaacaacccactcaaaaccccacgatcagctaggtgcagtgactcacgcctgtaatccgagcactttgggaggctaaggtgggtggatcacttgaggtcaggagttcgaaaccagcctggccaacatggtgaaaccccatctctactaaaaatacaacaattaggctgggtgcagtggctcatgcctgtaatcccagcactttgggaggccacgccaggcagatcacctgaggtcaggagttcgagaccagcctggccaatatggtgaaacctcatgtctactaaaaagacaaaaattagccgggtatggtggcgggtgcctgtaatcccagatgctctggaggctgaaacagtaaagtcccttgaacctgggaggcaaagggtgcagtgagctgagatcatgccactgcattgcagcctgggcgacagagtgagactccatcacaaaaaataaacaaacaaacaaacaaccacaataaagcagacaaaggcattccagactctcagcggcccatctttccaagcttccctgcttcagaatcaaaaccagaggaaaaagagacagtgatgagccaacagtgttcaccgtttcctgtttggagtcacggatccctttgaaaatcacctgaaagatcctctggactaaggaaatagtcttagctctgtatcccaagttttctttaaggaagtagcaagtacgcaactgtactgatcatgtagcactgatgtagaaagcacttttggaaatgggctgaaaaccctctgaaaattgtaaggcagacagaaagaatccccacctttgatctctttgtgcctcagttttctcatctgcaaactggggataataagagtgacttacctttcaggctgctaaaaggattatgagacttaacatgtgaaactattagagggcgggtctgtattagatgagttaagtgctcaaaagatgttagctattaacatgactgcagtgatgtctgttattgcactgggagagctgcaaattccctgaaggcaacctctcactctccaaggtggctgtgctctgcatcgggtaaggtagggtagggtgggaagatggagggcacttacgttgacctgctcctcgcaaatatctttagcctcctgcagcgagatgagaacaaaggccgtgagggccatgtctttctcgttgttgttccgtaatccaccctgagatagagagcagaaagcaaggatggggtcaccggtgtgtccacacatggcagtcatccccccttgcagattcagaatcagggggtctgggcagggctgagtctcttctaggtgttaccccgctaccctaggaaggtcaaacttcttagtattaattcatgcaacaatttgttccttctgcaaatgtcaatgtacaatgtgcaatgtacaatgggtacaacggtctgatccattgtaaaaccagacacaggctctagccctcacagagcttttgtctagtagggaagatggacatggtccatccagctcctcaagagatatacactttttttttttttttttgggacagttttgctcttgttgcccaggctggagtgcaatggcgcaatctcgactccctgcaacctccgcctcctggattcaagcaattctcctgcctcagcctccgaagtagctgggattacaagcatgcaccaccacaccaagctaatttttttgtatttagtagagatggggtttcccctgttggtcaggctggtcccgaactcctgacctcaggtgatccacctgcctcggcctcccacagtgctgggattacaggcatgagccactgcgcccagccaagagatatatacttataagtggatgagttctgtgcaagggaaagaggacatcgcagcgataatgaactgtgggagtgtgacccagttggggaggtcagaaaaagtgtccctgagggagtcaactctcacagacggcagggattagcatactaggtggcagaaacagcatgtgcaaaggccctgtagaacaatagagcaaggctcctatcaatggatggagcctggaaagaaaagaaaggctggaagtctggaagcctgaaaggtgagactgaggcagtgattctccatctcaagcacacattagcatcacctggaggaatgcgggcacttttaaaaactcagattcctaggccgggcgcggtggctcatgcctgtaatcccagcactttgggaggccaaggtgggcggatcacctgaggtcaggagttcaagaccagcctggccaacatggtgaaaccccgtctctactaaaaatacaaaaatcagctgggcatggtggagcgggcacctgtaatcccagctactgaggaggttgaggtaggagaattgcttgaacctgggaggtggaggttgcagtgagccaagatcgggccattgcactccagcctgggtgacaagagcaaaactccatctcaaacacacacacacacacacacacacacacacacacacacacacacactcacacccctcagattcctgggtcctgcccctagaatttctgattcagtgagtctggggtccggtctcagaatatgttttgtttttgagacagggtctcactctgttatcagcctggagtgcagtgtcatgatcatggctcactgcagcctcgacctcctgggctcaagccatcctcctgcctcggcctcccaaagcgctgggattacaggcatgggccgtcgagcccagccacagaatgcacatttttagtaagtcatgggtgctgttgctgccgctggtctgaggatcacacttcgagaaccagtgctcgaaggagttttgtgtttaagtgccacagggggagccacgggactttctaagaactgatccagctggatttgaaaaaatcaccccaactgctatgtggtgagtgtctgagagccaacaaaagtgggaggccaccaggatgatgaccaggaggtggtttctacaaggtctccaaataaggaggggcggggagagtgttgcttggaccaggggctggccataaggatggagagaaggaggtgattcttataacatcatgggagaatgcaggtgttgatggattgaatgtgagaaagggattcccaggcaggacccctgcacttggtttaatgaaattcttaataatttctgagcgaggggccgtgtctcttcattttgcgctgggcttcgcaggtctctggtttttgcaatgctggagtgacgcctctggctcatatatctgcctgcccccaccccccagcccaatctttgcaaagggaattgggcagtgggcacatggaggtggggctctctctcgtgttcatcctgcgagactcaggagcccctctcttccattttgccctaaatcccagcctcttacaatcatttcttggtgtatcacgggcgcatcctcctggaagaccccgtcgggcttctgcttctccaggatcagccatttaacagccccgcagaggacttgggagtcgatggcgatgaggttgacagccagagagaagaccttgaccacgtaggcggtcagcctggagtgggcacagagcatgagccaatcggctctgagatccagagactgccatgtcaaccagccaatgagcgtgggggagggaccagggcctggcccagtttgcctggtttgccttcccaggccccaggacccagctgttgtatgcggtccgtgcttaaggatgcttaatgaccgccggccactcagccagcgcttgcctggactctgcaggtccagggctgtttgggcaaggctggcctaagggaccacccctggccagggtccgggccctgctgggggttgagggtggggagtatgcatggcctgagctggctgttgggactcaccaggtgctgggtgcccgtttcacgaaggccgcaaaggcagagctgggttgtctgaaggccagctgctgggtgtaccctgcagagaagagagaggaacccccaaaagagccggggctgagcagagggggcacgccagaaagggcaggggcggggtgcagagaggggacaggggctcagggtggcggaggggttctgggaggaggggaccttaaaaagggaaggactcaaagagggtgggggatcagaacgaggaggtggaaaagttctcaagaggacaagggattcagagaggagaaggatattgagggtggggggctttcagggaggggagggctctcagagagggggtggagtctcagggaagaggcatggcctggagaggacgtggggcctcagatgagagtggctgggacaggaggtggcgcctcacagaagggtgtggccttgagaagatgtggggacccaggggatgggcgtggccttgaaaagaggcagggtctcgagattctggcctgggaggagtcagggcctcagagggcgtggccttgagaagaggtgggaggccctcaggggatgggcatggccttgaggagaggcggggtctcatgaagagcctggcctgggaggagtcagggcctcagagggcgtggccttgagaagaggtggggggccctcaggggatgggcatggccttgaggagaggcggggtctcatgaagagcctggcctgggaggagtcagggcctcagagggcgtggccttgagaagaggtggggggccctcaggggatgggcatggccttgaggagaggcggggtctcatgaaaagcctggcctgggaggagtcagggcctcagagggcgtagccttgagaagaggtggggcctcaaatgaggggagtggctaggagagaaggtggagcctcaggggagggcgtggtcttgagatgaggtgggatcttaggggagggatgcgctcggaaaggggtccctggggtctccaagaggggcagggagcccacccttcttgatgagctccaaggccccctgccgcttctctaggccgaacttctcccactgctccgtttcatccaggtaatgcacagcgatgaccgtgggcgtcatgccgatcatgttctgttccccgcagcccgagggggtcacaatgaggtgcttcagccgttccgcgtcgacggcatcctctgtcatctgggccactggggtccctgcagcaggtgggaagaggacgttgctcaagccaggtgggtgacccaccttggggtggcgtgaaaagggttccagcctcccaaccagccagggccaaggggttagggacaggcgaggactggggaggatgtgactgcggggaggggaggctgcatggctgagtggctgttcgggggtctgcactgttaggagtgggaggtgcttcacaggggcaccctggtccttgggtctcatttcaccagcagtaaaataattccagtaacaatattcaggaatacttatatcacgcttaatgttactttccagactgttctaagagaataccatagagtgtctcacttaatagtcaacgaggctgggcgccgtggctgaagcctgtaatctcagcactttgggaggctggggtgggtggatcacctgaggtcaggagttcaagaccagcctgaccaatatggtgaaacaccgtctctactaaaaatacaaaaattagtgggcatggtggcgggcgcctgtagtcccagctacttgggaggctgaggcacaagaatcacttgaacccgggaggctggggttgcagtgagccgagatcacgccactgcactctagcctggcgacagagtgagactccgcctcaaaaaaaaaaaaaaaatcatcacaccaacccttggaggtagatactattattctacccctaccaaaggtgaaaaaaccaaggctcttgccccaaagccttatagcttacaggttgcaagtccctttctttctccagtcttccctcctggggcaagaaatgacctccagaatttctgctcttgtactatgttgcttgtctttttgtttgtttgtttgtttgtttttgtttgagacaaagtcttgctctgccgcccaggctggagtgcagtggcctgatctcggcttactgcaacctacgcctcccacgttcaatcgattatcctgcttcagcctcccgagtggctgggattacaggcatgtgccaccacgcccagctaacttttgtatttttagtagagacagggtttcaccatgttggccaggctggtctcaaactcctacctcaggtggtctgcctgcctcggcctcccaaagtgctgggattacaggctattgagtctcatttaagctggtttcccatctaagaagcacagaaggtctagaaaaattaaaataaactgatgtatcagcgaaagctctttgctgaactaaatgctatctggaggcttctataaaaccgatcatagcaaataatatctgtatggttaaaaaaatttttaggccgggcataatggctcatgcctgtaatcccagcactttgggaggctgaggcgggtggatcacgaggtcaggagatcgagaccatcctggctaacacggtgaaaccctgtctctactaaaaatacaaaaaaattagccgggcgtggtggcgggtggctgtagtcccagctactcgggaggctgaggcaggagaatggcgtgaacccgggaggcggagcttgcagcgagctgaggtcgcgccactgcactccagcctgggtgacagagccagactctgtctcaaaaaaaaaaaaaaaaaaaaatgtaaaagagggaaaacagatcacagatgggctgttctagctgaaggggaagagaaaggtgcgggttaaacacctccagaatgagatggaatttggctccatccatgccctcctgggacccatggggtcggggtcaagggtgtctcaccttgcaggagaattctggtctcagactcggtgtccgggacttggtcactgaggtctgcaggtgggatgtcctctttctgcactccttctgcagggtgagtgagagataccgatggctctagctccctcccgccctatcctacctcactaaacccaggtcatttaccccccttaccctgccagcccctcagcccctccccctgcagccgactcaccacggcccaggcgttctggatccagggtgcgaacagccacagttttgttcattctgattccttccggctacgcagtgttagaggtggggggagtcgttggatgaataaaagaacagacagacacacagatggtcagcagggcactgtccttaggatcaccctagcattgccgggcgcggtggctcgtgcctgtgatcctagcactttgggaggccgaggtgggtggatcacgaggtcagaagatcgagaccatcctggctaacacagtgaaaccctgtctctactaaaaatacaaaaaaattagccgggcgtggtggctggcgcctgtagtcccagctactcgggaggctgaggcaggaggatggcgtgaacccgggaggcggatattgcagtgagctgagatcgcgccactgcactccagcctggggaacagagtgagactctgtctcaaaaaaataaacaaacaaataaataaataaataaaaaatttcaaatcgagtataaaaaaattattgattggtgatggtcgacgaggtttttggcaccacctaaaattctaagcctggggtcatctcactcactttaccccaatcctggctctgcttctgaaattctgggacttccaaatttcctaagctggacactatgattcttagtgtctcagagcctggatctccaacctgagtcaatagtacgaagaccaggagccctctctgaaggacaagggtttgtgggtgccccaagcactcaccacgaccttcagggacttcctgacaccgtcactgatgaaatgatggtagacagcagccttgacttccacttcctgcaggccggtctttagcggcacgatgacatatggaacggacaacgaggacttgggggggatggttacggtctgctggtgacgcctcttggtggtggccaggctgcagaaggctggattgtggagtagttccaccctcacctgccagggagagaaaggatccgggcaagtgtgtgtgcaacaggctacctaccccctggcagcctccaagaagcctctgccaccccgggacccaccttgagctcttggttctgccggtaattgtagagaacggctcggatttccacctgctcgtttcgaacaacagagtagggtagccgcaggtcgatgaagaagtcctgcattactgtgacctcgaaggggtctgccacacagatccctgctcgggcagagacagaacacggagtgtcaaggtcggggagtggacaaggccaggctcctgggtctcagctcttagtccactccgcaggagctctccctaactcagcctgtctttgctgaagcctgtgaactaaacgctgtcaatggcgacaaatgacagatgatgatggtggtggctgggagttaccattatttattattattattattattattattattattattattaattatttgagacagagcaagactctgtcgccaggctggagtgcagtggcgccatctcggctcaacgcaacctccgcctcctgggttcaagcaattctcctgcctcagcctctcgagtagctgggactgcaggcacgcaccaccatgtccagctaatttttgtatatttagtagagatggggtttcaccatgttggccaggatggtctcgatctcttgacctcacgatccacccgcctcagcctcccaagtgctgagattacaggcgtgagccactgcgcctggccggagttaccactatttaatgatttacattctgtttgtagtttgactcagagatctacgtgtagggaggaagagaaatctccaaaatatatctgcttgtctgatatggtagccccaagctgtgggggagcgctgagcacttgaaatggggtttgcctgagtgagaaactggatttgtacttttatttgatgtacttgtatttaaatgtatttaatttaattcagacttaaactttaaacctgatgatctagctaggtgcggtggctcatgcctgtaatcacagcactttgggaggctgaggcaggaggattgcttgagcccaggagttcaaggctgcagtgagctatgatcgcaccactgtgctccagcctgggcaacagagtgagatcctgtctgtaaaaccaaacccaatgaaacaaaacaaacaactgatgctcattttaaatatatgaaacaccactgaattatatattttattattttttatttatttattttttgagatggggtctcgctctgtcacccaggctggagtgcagtggcgtgatcttggctcactacaacctctatatcctgggttcaagcaattctcctgcctcagcctcctgagtagctgggattacaggcacccacccgcatgtcctgctaattttttgtatttttagtagagacagggtttcaccatgttggccaggctgttctccacctcctgacctcaggtgatctgcctgcctgggcctcccaaagtgctgggattacaggtgtgagccaccgtgcccgacctgagttgtacattttaaaagggtgacatatagtaagtgaattaaatcttaattttttaaaaatgatgattgagtggaaaacgtttaagtatttttgcaactacttgagtatgaggatctaccttttctttctcttttcttttcttttcttttttttttttgtagagacggggctttgccatgttgcccaggctggtctcaaactccgacctcaaatgatttgccggcctcagcctctgaaagtaatgggattacaggcttgagcctttgcacccggcctgagaatctaccttttcaactgtaaattttatgaaacctaaaatacagatcaaagtatttccagtgaaaacctagcatcctgcgctgggcgcggtggctcacgcctgtaattccagcactctgggaggctgaggaaggcagattgcttgaggccaggagtttgagaccagcctggccaacatggtgacaccctgtctctactaaaaaaagaaaacttagcatcctgtttacaccactgcactccatcctaggtgacagagcaagctcctgtatcaaaaaaaaaaaagaaagaaaatctagtatcctaaatgagatgcactgaattgtaaaacacatgctggattttgaagacttagtgcaaacagaagtaaaatatatcatcagtaattttgatatactagtagattattatcaaatattaaaaggttatagtcacattattagtgggttgtggttttgcaactttttacaaaatgttgaaatgatactattttgggtatatttaaattaaatagaatgttttgtaataagttatgatatggtataattatagatatgtaatcaataataaatgatacatcatttatattatatatctaataaaatatacattatatatgttaacatgtcaacaataacaaatgacatattagtagtaaattataattatacattacaacaaaattaaattataataaattatggtttattataatgtattaaattataatgaattatggtttattataattcattaaattatattataattaaatttcttataaattataatacatattatatgtttacataatatattacatgtgtaatatgtatatattacatatatattatatatgtaatatacaatatataatatattatatatgtaatatgcaacatataacatattatatatgtgatatgcaatatatattatatgtaatataacatattacatgtaatatgtaatatatgatatatatgtaatatgatatattatatatgtaatatatgatatatatgtaatatgatatattatatatgtaatatatgatatatgtaatatgatatatgtaatatatatgttatatatgtaatatataatatatgtaatatgatatattatatatgtaatatataatatatgtaatatgatatattatatatgtaatatataatatatgtaatatatgatatattatatatgtaatatataatatatgatatattatatatgtaatatataatatatgatatattatatatgtaatatataatatatgatatattatatatgtaatatataatatatgatatattatatatgtaatatgtggtatgttatatatgtaatatgtggtatataatatattgcatatgtaatatgtgatatgtagatatgaaatatattatgtaatatataattatatattataattataaacattacaattaataaatatataaataaatattataattaaatttattataaattataataaaccatataaattatggctggatgaccgagtgagactccttctcaaaaacaaaagaaagaaagaaaagcatcaattttagagactgtacccccaccctgtctagcttttgacactgttagagtaggcagataggcggaaatgagcaggcaggggagctttctgggaaaagaagtcccagacaggctgcctactgacagcgctgctcactggcagtcagcgaaaaggacgatggctactttagctacacatggccttgtggttggggtcctctggccctgaaggggacttatcaggtcctagctggaaataactttgctagggattttccccgatgatgagcatgtgcactgctccgaaaacaccctagagttgtgttttgctcattatcatagtaaaaaacacacctctgggtggagattttcgatgctaatgagacatgccacgtgcatgctagtacctacagccacagagcctgctcgcccaaagagacctcccaaaacatgcttacaagtgacacccactcacgccccttcacgaaaaatcatgtaagagtctcataaaaagagtctaccagcagtatctgctgctggctcgttctgttgagcagccatgtctgtgtcgtctttcagagcatacggtcactttttatttatttagagaaggagttttgctcttgttgcccaggctggagtgcagtggcacaatctcagctcaccgcaacctccacctcccgggttcaaccaaatctcctgcctcagcctcccgagtagctgggattataggcgcccgccaccccctgcctggctaattgttttgtactttcagtagagacggggtttcaccacgttgaccaggctggtcttgaactcctgacctgaagtgattcccctgcctcagcctcccaaagtgctgggattataggtgtgagccatcgaggctggccctgtctctttaaataagcattgctactactatttttccagggggaccagcccagagctgtttcttccttcaataaactctgctacttaacccttgctatgtgactcttggctgaattctttcttccaagttagacaggaactaaggattcccacagttcctggtaacaacacctctgtggtaaccagggcagagaataaagtgccaagaaacatagggttgattgagtttggataaaatgagatgacactcagacaccctggggtccctgcctcccggggaccagccagcatcctctctcacctttcttgtccgacatgctcacagccagaatctcccacgtggtgatggagtctttcaaaaatatattcatgagcttcgtagagattctggatggagaagaggttggggtattaggagatgtcatctagcagggtggtagaggggaagaactggtgcagagggaccccaagggacaggctggaagggtctgggggtgcctccatgtaggtcacccaattcctgatttttctaggttgggctgtggggttgcactgtgattccagagaagaccagagatagcaggtgcatgcaaattaaacggtctgactctggggtgggttgtaccgggggtaccccggccttacccatttttcggtggctctttcaagtcctcaacgttccacagccagctctctgggaactcacttcgggaaacgatgttctcttctgcaatgatgtcctcatccaggttacctgcagggggtttagatctgcatttagaacagagcaggccagttgccatggctcatgcctgaaatcccagcacttagggaggccaaggcaggtggatcacttgaggccaggagttggagaccagcctagctaacatggtgaaacccatctctactaaaaatacaaaaattaaggctgggcacggtggctcacccctgtaatcccagcactttgggaggctgaggtgggtggatcgcttgaggtcaggactttgagaccagcctggacaacatggtgaaaccccatctctactaaaaacacaaaaattagctgggtgtggtggcgcgtgcctgtgatcccagctactgtggaggctgaggcagcagaatcacttgaacccaggaggtggaggttgcagtgagctgagatcacacgactacactccagcccaggcgacagagacagactccatctgaaaacaaaaacaaaaaacaaacaaaaagagagccgacctacttcctcagcggtcacacctttagatcctacctctgcccaggagggattcctagcagtgaaatacatcccggacatggaggacttcaggatgaattttcacgagccccagacacatctgccttgggaacttcttctccataaaaagaactaaaaattatatcccacaaatgtactggtataaggacatatacaatgcagactggattatagtcattcctttccctttgatttttaaagaaacgaaagcatttggccaggcacagtggctcacatctgtaattccagcactttgggaggccgaggcgggtggatcacttgaggtcaggagttcgagacagcctggccaatgtggcaaaaccgcgcctctactaaaaatatgaaaattagccaggcttggcagcgggcacctgtagtcccagatactcgggaggctgaggcaggagaatcgcttgaacccgggaggcagaggttgtagtgagccaagattatgccactgcactccagcctcggtgacggagtgagactccatctcaaaaaaagataataataaaagaaagcaagcatgtgcatgtggctctaaaggatcaccgtcccgagaaaccgtgtctgcttcctctgagggatttgtccattctgaacatgactaggtgagctgagaacattcccagacctggtgcagaacactgaagaagcggtggcctttaaaaaccacctaatacaaaaattagctgggtgtgatggcatgcgcctgtaatcccagctactcgggaggctgagggatgagaatctcttgaatccaggaggcggaggttacagtgagccgagactgcgcaactgcactccagcctggcgacagagcgagactccctctcaaacaaacaaacaaacaaacaaaaaacaaagaaaaaaacacaaaaaaaatctcgataggctggatgtggtgctatcatcccagcgctctgagaggccaaggtgggaggatggcttgagcccaggagtttgagaccagcctgggcaacacactgagaccctctctctacaaataataatttaaaaattagctgggcatgctggcatgcacctgtagtcctagctactcagaaggctgaggatgagacagaaggactccttgagcccaagaggttgacgctgcagtgagctgtgatcgcaccactgcactccagcctgggcgaaagagcaagatcctgcctctaaataaatatataaataaacaaaaacagcttgacactaccagcaagtaaatgaaattggactggactaggctttgactcaaactgcactttcctcaaacatgatagacaggctttaattgggttctggatctccataacaacaaagtagctggaatcccttaaaaaatatatatattttaatatttttcagccaggcacagtggctcatgcctgtaatcccaatactttgggaggcggaggcgggcagatccccgaaggttgggagttcgacaccagcctggccaacacggtgaaacctcttttctactaaaaatacaaaaattagctgggtgtggtggcaggtgcctgtaatcccagctacttgggaggctgaggcaggagaatcacttgaacacgggaggcggaggttgtagtgagccaagattgcaccactgtactgcagcctgtgtgacagagcgagactccatctcaaaaaaacaaataataataatctcagctactcaggaggctgaggcaggagaatcgcttgaacccatgaggtggaggttgcggtgagccgaggttgtgccactgtacttcagcctgggtgacagagcaagattccatctcaaaaaaaaaaaaaaaagttttcgtccgtacaaagtctcactacgctgcccagactgctctcaaactccagagctcaagcgatcccgctgcctcagcctcccaaagtgctgggatcacaggtgtgagccactaagcccagcccaaagtagatggaattcctaaaagagatacctgaatttactcacactctggaataatcaatccaagtgtcttgggatagtaacatttagccattctttttctgacccccaatgggccaaaggaattacacaattctggagaaaagtacagcccaccatccatgtggatgtaaaccatatttcagtagaccagactttttgtctaattttcccagtgaccctcacactatcgcctctttgtgaaggagatcattctaaatttgcttgaattttttcttttcattttcttttcttttctctctctttttttttttttcttttttgagacagggtcttgctctgttgcccaggctggagtgcggtggtgtgattttggctcattgacgcctccatctcctgggttcaaacgatcctcccacctcagcctcctgagtagctgggactacaggtgtgcacccccacacccggctaattattttattttatttttgtagatatggggttctgccatgttgcccaggctggtctcaaatttctggactcaagcaatccacccttctcggcctcgcaaagtgtgggcattacaggtgtgagccaccgtgcccggccaattttctttttcctttctttttttgttttgttttgttttgtttttgagacggagtcttgctctgttgcccaggctggagtgcagtggcacaatctcagctcactgcaacctaaacctaccaggttcaagcgattctcccacctcagcctcctgagtagctgggattacaggcgcctgccagctcgccaggctatttttgcatttttagtagagacggggtttcaccatgttggccagactagtcttgaactcctgacctcaagtgatccatccacctcggcctcccaaagtgctgcgattgccggtgtgagccaccatgcccggccaattttctcttattataagataaatttctctttgtttcacttaagacttatttcacgtgagatctaaagtctcacctgattcaaaaactgaatgcatgcatgaatgaagaagggctgcctgttcactcatcgagtttggcaggtctttctggaatgccacacaaattagttttctctggtgaagccaaacttggaactcaccttagctttcccattggtaattagtgtgtgaccagccccatcatctttctagacttttccctcagacctccaatgtcctgggcactggtgatgtccaattcagactgatgggtggggctgggatgaccttcccaggcaggaaactgctctgccttcaggcaagggcccttctccccatcagactaggcccttctcctccctcaggcctgggcctcctggctcctcatctgaaggcctctgtcccttccagacaggagtgtcccctcccctcggacgggagcctcctccatctcagatgggcatctacgcttctctgacttgatcctcccctcttcagacctgggtcttctctacctcacgctggcagggcatcacctcatcggcatcaccctcagacaggggcctcctctcccaacagacagaggcctcctcctaccctctcagacagcggcatcctcccccctcagacagaggcctcctccctcctcagacaggggactcctccccccgagacagaggcctcctcctaccccctcagacaggggcatcctcccccctcagacagaggcctcctcccccctcagacaggtacctcctctctcctcagacagaggcctcctccctcctcagacggggacctcctcccccctcaaggcctcctccctcctcagacagggacctcctccctcctcagacggaggtttcctccctcctcagacaggggcctcctcccccctgagacagggacctcctgccccctcagacaggggcctcctcccccctcagacagcggcctcctccagccccacccccaccagacagggcatcctccctcctcagacaggagtctcctcccccatcagacggccccctccccctgtccccaccccgtgggacctactcctggccaggcccaggtggctggcccgcgcgtgctgccgccgcagctctgtgatgtagttgcagcagtccaggaagaccttcttgcacgcctcgcccagggagatgaaacgggtccggcgctggcacgagaacctcatggggttctcccgcatgccgtcctcgcagcacttgcgcagctccttggggtacttgccgactgcgggagcacgtgttcccccaggccacaccctcagccgggggccggcagcaggagggacgcgggacggaccccagggaggacttccccgccgccagggcctcccctcctccctctctggctcctgcacggccgggctggggtctcctggggtggggctcgggggcaggagtgggtaggaaaggctcccacctttgtccattcgcttctccgtgagctgcacggaacggcgtcggcgggcggctggctgcgggcactgaagttctgcagggcaggcggaccgagaagaagatggatgaggcacctactaggtgtcctcggttcacccctcacgatcgtgtgaggtgggggtgttcctgctcccatttgatggaagagcaaactgaggctcagaggggagggatttactaggtggtggtggaggcggggcttgaacccaggcccccggtttccagagctctgctcccagcatctgggaggtggaggtgctgtctgtccctgcaccggcccctggtggcgacctcacctgccctctgggcggtctgctggccactgctgctcgtgaaggtcagccctgcgtcggagaagacaccggcgtaatccttcccactgcccggggtgcagccgatgtctgccttctccaccacgtcccagatctgcggggggcataggggtggcgggacgcagggaggccaggctgacaattgggatcccccacatatgcacctgtgtatctcttcccaaatgaccccaccctgtcccactctcatctcccccattcctgcttctgcccttcctttctctttctctttccttccttccttctctctccttccttctctttttctttctctttctcactctctctctttctttctttcgagatggagtcttgctctgtcacccaggctggagtgcagtggtgtgatctccgctcactgtaacctccaactcccaggttcaggcaattttcctgcctcagcctcccgagtatctgggactacaggtgcatgccaccatgcccagctaatttttatatatttagtagagacgggatttcaccatgttggccaggctggtctcgaactcctgacctgaaatgattcgcctgtcttggcctcccaaagtgcttggcctcccaaagggattacaggagtgagccaccatgcccggccttctttttcttttctttctgtcttctttctttcccttccttcctctccctcccttcctccctccattcctcctttcctccttcctttgctccccctttccttccctccttccctccttccttccttccttctttccttccttcattcttcactccctccctcccttcctctttatctcctttctttttctttctctctgtttctctctctcttctttttttttcctcctttctttccattctttttttttttttttaagttgggattttccactgtctcccaggctggagtgcagtggtgcaggcatagctcactgcagcctcaaattcctgggctcaagcaatcctcgcacctctgcctcctgagcagatgggactacaggcatgcgccatcatgcccagctattttaaaattttttctgtagagatggggtcttgccatgttgcccaagctggtctgaactcctggcctcaagtgatcctcccaccttgacctcccaaagtgctgggattccagacgtgagccaccgcacctggcctccattccaaatcttatctccatttcccctctgattccatctgcattcccatcctcactcctgatcccaagccaaccccatctccatcttcgtccctactccggaaaccttccccactgaatgaccctgggtgtgctgccaccagcctctcagggccccagttgaaagtgtccaattctcagccgggcgcagtggctcacgcctgtaatcccaacactttgggaggtcgaggcgggtggatcacaaggccaagagatcgagaccatcctggccaacatggtgaaacccccgtcttcactaaaaatacaaaaattagctgggcgtggtgatgggcacctgtagtcccagctactagggaagctgaggcaggagaatcgcttgaacctgggaggcagaggttgcagtgagccgagattgtgccactgcactccagcctggtgacagagagagactctgtctcaaaaacaaacaaacaaacagaaaaaaaagtccaattctcaggaccatccccaattggaacccatgtccaacctcattcccatcttcagcttcaaccatccctgtgtctggtctgctccgatctctgctttcagcgcatgccccccactgcactgccctctccagtcccacccacctcccccagccccagctccgtgcctccgcctcttctcagcagccttgggtcactggcccttaccttactctgcgtcagtttgttcttcttattcagcacgaacacgcccttgtccacggccaccagtaccacccgggccccgtggtcaccctctatcttcagggtcatctgctgcccaggtacaggctgccggtcttctgactggccgctttttaccaccagctgtggggagggtggagacgccgaaagaagtcagccctgggagagaggagtgcctgggatggagtgggtgctgggctagagtggaaagacagaaaggttggggggagccgtggggctggggagggggagagagagggagagagagagaaagggagagagggagggagagagagggagagagggcgggagagagagagaaagggagagacagggagagagacggagagacagggagagagggagagagacggagagacagagagagggagagtgaggggggagagagggaaagggaaagagggagagaaagggagagggagagagagggaaagagagagggagagagagagggaaagagagaaggagagaaagagggagagagaaggagagagagggagagagagaaagggagagagagagggagagggaaagagagagggagagaaagagaggggagagagagggaaagggaaagagacagggagagagaaaaggagagagagagggagagagaaaaggagagagatggagagaaagagagatcgagagagggagagagagaaggaaagagaaataaagagagagggaaagagagatgtagagagagggaaagagagataaaaagagagacagttgagagacagagagggaggagagaaagggagaggaagagaagagagagaaaggagagagaaaaggagaaagggagagagagagagagaggagacagggagagagagagagagagaggagtagggagagggagagggggcgagcgagcccagggcacacttaccgagcccacgcaggagtccttgacgtccacccacacggagtcggccaccacctccctctggccgctggcaccgatcagcgtgtagtacgccaccaggcggaaggaagggatgaagtcggtggtgatggacaggggcagcaccaccaggtcctggccgggctctcgcacctggcgtcccgccttcaacagcctgcccttgttcatgatctggggggacaggctggcatcaggctggggagggtgagtggcagggaacgcagggagggatccgggatgggggaaggagtcccaggggtgcggaagaaacaaggaggaggcgggggctgaggtttccaggtggccacggaccaggtaggtgtagtagcggatcttggcctcgtgggcgcggtccattcgcaggaggaagttgacgttgagggtctccccgggtctgagctctgtacgtagcactgagagatgcaggtaattgttggagttgcccacggtgctgtagggcagagcctgcatggtcctggtagcctgctctgcctccgagagctcctgcttcttcgtgcgcacctgggtggggaaagagggatgcctgctggtcgccgcccgaggatacccacacccgaatccctgagacctgggaattggtggcctttcttaacaaaaggggctttgcagatgggattaagttagggatctggagatggaatcattatcctggattatgtaggtggagctaatgtaatcataagggtctttattaagcaggggcaggggagaaaggagagacagagacagagagaaagagagacactggaagatgctatgctgctgcctttaaaggtggaggaaggggccatgagccaggcctttagggtgccctggcgacactggaaaaagcaagggagcgaactttcccccagagccaggacttctgacctctcaaactatagacccataaatgtgtgttgctttagatcactaggctgtggccatttctcatggtagccaccggaaattcacgcacatgctgagcacagggaggggtaagtggggtgcgcagcctgggagctgcagagggactgggaggccatctgcaacctccgcagctgtcatgagacttgcttccctcccagtgaggggcaacagagccacgtgcacagaagccaggagaactgagaccacctcacaacaatgggcctgtcccaaacactacacaaccctccttgtgagattcaggctccttcccccatgggagtggaaagactgtgcgtggatggagcgcctctccgtgtaagtggaaggagcagggcatgcaagaggaagattcctgtttcctcaaactgcggacccctccatgcagacggcaggaccccactgtgcaggacagaacccctctaggcaaatgagaatgtctatgcaaatggcaggaccccactgtgcaggacagaacccctctatgcagatgagagtatctctatgcaaatggcaggacccctctgcgcaggagagaacctctctatgcagatgagaatatctgtatgcaaatgacaggaccccactgtgcaaacaccagaacccctgtaccgtcttcccagtgatggggttccgaggctgggcccagacgcaccgtgatgctcaagggcttctggctggggtgtgtgttgatgctgagtttggccacgccatctccctgggttagagactgcacagtgtcctcgccctggactgccacggggactcggtaggctggagagccatcagggttcgtcacgaacacctgtgatgtggggtgcaggtgggggaagttcaggcaggctcagggctgtggccggtgtccccgaagggaggagtgggaccccttcccgccccgggtctcaccatgaggtcaaagggcattcctggtttgaagtacttgggtgtcttggtgaagtggatctggtagggagaggtcacgatggggatcccgctgcgctctgcctgcaccatgtcactgcctgaggggaccagctgtgagtgtaggcttctgggccacccctcaggattagacctcctccctcagaatggaccccaacttcagactagacctcctccctcagagtagagtccactttcatactgggcctgtgccccccatcagactggactccacctttatactggccttgcctcctccatcagactggcacagacttcatactgggcctgtgacccccatcagaccggaccccacctttatactggccctgcctcccccatcagactggacccatctttatactggccctgcctccctcatcagactggacacagacttcatactgggcctgtgcccccatcagcccggaccccacctttatactggccctgcctccccccatcaggctggaatccatcttcatactcggcctcccctctcagactgggcctaccccatcagactgaaccccactttcactctgagcctccctccttagactaggctttctcttctgacctggtctcccctctcagaccggcccacttggtggtcctgagcctggccttcagactgggcctcacctgagtgcaagatgacggtggcagacacgtacaaagacttccccaccaggtcttctgctcgggggttctgcaccccgtccagcagtaccttccggctcagcacaacctcccccgagccatcctcaatctgagaagggagaggagggctcagagaggggagcgggctcagaggtggcggggactggggcagggatcaaagcggcctccgtctatggtaccggaatgcgcttgagggattcaggcagggaaatcctctgttcgccatcctggatcccgaagatgacaaaggcagttccctccactttcttcccgtagaggaacctacgggacagacaaggagggcttcaggtccatccctcctggagaatgggatctcccccagcttctcctgcctgtgctgaagactggagcccccaacccactgctggcctctcacctggccccacctccagcccctcacctggccccacccccagccccccaccttgccccactcccaccccccacatggtcccacctccagcccctcacctggccccacccccagccccccaccttccccactcccagcccccacctgactccaccccccagccccccacctggtcccacccccagcccctcaccttgccccacccccagccccccaccttccccacccccagccccccacctgactccacccccagccccccacctggtcccatctccagccccccacctgactccacccccagtcccccacctggtcttcacctggtccctcacctggctcttacctggccccacccccagtccctcacctggcggtgatggtgacctccaggcccttctcgttatagatgtagtagaatttctctgtaggctccactatgacctcgaaactgggcagcactgggggagagatggcgttggtggggccggcgctgggccaggcgttctgggcactgactccccccagcccctcctcctcttaccgtactccttcacctcaaactcagtggagaagacctgctgtggtgagttttcatagtaggctcggatcttccactggcccatgctgtgaggagggcggatgagtggtctctcaggcctcggagcccccctgctccctctccggggataggggagccctgagccccctcctcaagaacctgacatacttgacgagttccggaatgtcccaagacaagggcaagacgccaagctggttctgagaagacaaggagtcctgcttgaccgggatgccttccgggttctgtgggaggcaggagggaaggatagaggataaagtggctcttcggaggctgggcttagcctctcagctctccccgacctgtgtctggacattctctgtgcacagtgtctactgtggttaagaacagggacccaggtgggcgcagcggctcacgcctgtcatcccagcactctgggaggctgaggcgggcagatcacctgaggtcaggagttcaagaccagcctggccaacgtgatgaaaccctgtctctactaaaaatacaaaaattagccaggcatggtggtaggcacccgtaatcccagctactcaggaggctgaggcgggagaatcgcttgaacccgggaggcggagattgcagagagccaagatcactccactgcactccagcctgggagacagagtgagagtctgtctcgaaaaaaagaacaaggaccggagtcagtcaaccttaggtttcaatctctactgtgccacttacaagctgtgtgaccctgggcaagttacctaacctctctgtgctcaatgtgcaaatcttgaaacaggagattataatggcacctactgtgttggcttgggacatagttcatatgagtaggggctcattttttcagtgtctctctgaatactaataactagtagtgtcatttcatttgctgccaacatttaaacatcatgagacatcattgcaccactgcactccagtctgggtgaaagagcgagaccccatctcaaaaaataatgtattagggcgagcgcaatggctcaagcctgtaatcccagcactttgagaggcagaagtgggaagattgctcaaggtcaagggttcaagaccagcctgggaaatgtagggagactccatctctacaaaaattttttaaaattagctggatgtggtggcgcacgtctgtggtcccagctacccaggaggctgagacaggaggacagcttgggcccaggaggtcaatgctgcagtgagctgtgattgtgccactgcactctagcctgggcaacagaatgagaccctgtctcaaaaataataataatgaatgaatgaatgaataaataagtttaaaagaaattgtacagaggtaacagggatcaggcaagtggcatatctgaaggccgtgagctggctttaggaattaaaacatataaaaatctgttttttttttgttttttttgtttttttttttgagacggagtcttgctctgtcgcccaggctggagtgtaatggcgagatctcggctcactgcaggctccgcctcccgggttcacaccattctcctgcctcagcctctcgagtagctgggactacaggtgcccgccaccacgcccagctaattttttttttgtacttttaataaagacggggtttcaccgtgttagccaggatggtctcgatctcctgacctcgtgatctgcccgcctccacctcccaaagtgctgggattataggagtgagccactgcacctggccaaaaatctgtttttctagcttctgttggaaacaaggaaatttctgtggatagtgtactctggttagcaggagacatctaattggagctgggcaactgttgtgcctttacaagagatgtgtggtctctgttccccacagaccacatcaatccctaaatctagataatttttacattttttttgtagagatgtagtctccctagctttcccaggctggtcttgaactcttggcctcgagcagtcttcccacctctgcctcccgaaatgttggaattacaggcttgagccattgcatttgccccaattattttttgagacagggtctcactctgccacccaggctggagtgcagtggtgcgatcacggctcactgcagcctggaattcctgggctcaagtgatcctcctgcctcagcctcctggggtagctgcaaccacaagcaagcaccaccacacacagctgtttttttgtttgtttttaacttttcttttttgtagagacagggtctggctgtgttgcccaggctggtcttggactcttgggctcaagcgatcctcccgccttggcctcccaaacagctgggattacaagtgtgagccactgcacctagccttgtatgatttcaacacatcctcatgataattctatgagaacaccctccttccccttctctcctcccatccttctcgcttcttccagtaagttttttattaaacccaactatataccagcattgtgctgagttcaggtgacaaaaccctcaacaaacataacaattccttcctggagggatttaggttcaatagagggcgaggcgatgggagaagcaattatcaaatgaataaatctcatttgcaggacatggcaggaaggaggagtgtgtgtagcggggaggggggacgctcagggtgggtatttgcgactttataggttactcagagagacctcattgtaaaattgagacattggtgacatttgagcaaagacttaaaggaggagagagaacaagctgtgtggatatttggaagaagagggttttcttgagaagagggcacagcccgtgccaaggcgccaaggcaggactgcacctgggtgttggaggaacagggaggatggcccgtgtggctccagaagagtgaacgagggggagagagggaggaggggagggcagggaagggacagggcaaggtgtgcagggccttgtggactgcagggaggacttgggctttgacgcataggaaggtgggagccatggagggctgtaggcagagcagggatgggccctgactcaggtgctcacaggcgtcctctggctgccgtcggtagaatagatgacatacaattatccgtcatgatcccgatattcagataaggtaactgaggctcagggaggtgaagtgatcaggggtttaactgaaagcagaatccacggacacctgcactgctccctggggtctccctggatctccaccttgtctctcagcctgtgtgtgtgtgtgtgtgtgtgtgcgcgccatatggtgtattgtgtggttgtgtgttgggttgtgtgttgtgtgtgctatgtttgtgtgcactgtgttgtgtggtcgtgtatgttgtgtggttgtgtgttgtgtggttgtgtatgttgtgtgtgtgttgtgttttgtgtgtgttgtgtgtgttgtgtgttgtgtgtgtttgtgtgtgttgtgtgatagtgttgtgtggttgtgtgttgtgtgtggtgtggttatgtatgttgtgttgtgttgtgtgtgttttgtgtgtattgcgtggttgtgtatgttgtgtattgtgttgtgtgtgttgtgtgttgtgtgtgtggtcatgcacgttgtgctgtgtgtattgtgttgtgtgttgtgttgtgtgtgttgtgtggtcgtgtatgttgtgtgtttgtgtgtgttgcattgtgtgtgtgcattgtgtgtgcacatgtgtctgcatatctctttgcctctgtgtgtgtattgtgtgctgtgtgtgtgcatgttgtgtgctgtatgtgtgtgtgttgtgtgggtgtgtgtctgcatatctctttgcctctgtgtctctgccactgcaccccttccggtgtgtctttctctgtctctctcgatctctttgcctctcctaagcctgtgcccctgcttcccctggggccccctctggctggcacctcaatgttgaccatgaccgtccggcccacgggtagcagcttgtggttgacggtgaagatccgatagagaactggggagagacaaagaggcctcgtgagaccctagcccgcccacgccggtgccccgccctctccagccgcccccagcctcacctgtggagccaggggtgtagatggtcttgtctgtctggatgaagaggtacccgctctgcaggctgaccagcaccaccttctccaccacttgggtcccgaaggtggcctgcacggtcacgaacttgttgcgccccttttctgacttgaactccctgttggctgggatctaggcgtgggcagggcattgtcaggggtctgttccaaggccccatgcccacggtccagcttccggatcttgggctgggtccctccttgcctgcccattattcttggtcttccgaggtggccgttttggggagggaggggcatgtgaaggaggtgcgaggggagaggggggaccagggagggaactcaaaaagaagagctcacaaggaggagagagcttataggaggaggggctcagaaggggcggggactcagaaagggaaggggctgacatgggaggggctcagaaagggggagggactcaggtgagggaacttagaaagtgatggagactaagaggggaggagttcagaagaggagacttcgagggggaggggcttggaaaaggaattcagtgggagggacttagagggggaggagactcagaaggggtggagtctcagagaaggggaggaacctcagaaggggtggggtctcagggaagggagggactcagaaggggaggagtctcagaaggggtggggtctcagggaaggtcagggcttagaaggggaggagattcagaaggggtgggggggggtctcagaaaagggaggggcttataaggggaggagactcagaaggggtggagtctcagagaagggaggggcttagaaggagaggcgactccgaaggggtggagtctcagggaagggcagggcttagaaagggagaagacagaaggggaggggctcaggaggagggggggagtgggcgtggctgtgggtgtcagccgggtcctgcgccagtctgcactcaccgtgaaggtgacgttgcccatgtggttggtggcaggggtcagcacagtcttctcactggacagcactagttttttgcctgggaagtcgtggacagtaacagtgactggaacatccccttgcgcgtcgtgggcctccagcaccatggtctcctcgctctccagccgcaagatgttgggggtgatgatagagtacctgtcggagtggggcacgggagtgggcttgtcattccacggatgtgagacgccagtcctcactggagtcagcgcctggcaggctgtgtgccccagcctctggtcctggagaggatccagtgactgccggcgcacttgccaatgccattatcttctctgggcactgccaccgtctcaaccacatgggcaggacagcagccaccatgactcccactctcagccagctgggcctggcctttgaaagcctgggcaacgagggggccacacatcccaccaaaccctgaaccttccaaccagcgtcagcaactcctccaagtctctggacttccagacccacaatcgcctaaacccacacatgccccaaaccctaaacctctacctctctaaacactccaaatatgtaaacactcaaactcccggacaccctcaactctacctacccaaacccacatacgccaaaacctctaaacctcaaatcttagagcaccccaaacccagcctaaacctccaacaccccagtcctaataaatacaatcaattccaaatgccccaactatacatgaacccgaagtagccaatctttaaacccacactgaaaattgcaagtccccaagctgcaaactcccaaatcttgtaaagtccaaacctccgagtctccaaacacccccaaccgcaccatcaatgaacaccacatacaccctaaaccaacagatgacctcaattctagaaacatcccaaactccaattccaccatacctggattccacaaacacccaacccataaacacccaaactctcaggcagcccaaatgtatataaactccaattccacgatacctggattccacaaacacccaaccacaaacacccaaactcacaggcagcccaaatgtatataaactccaattccatgatacctggattccacaaacacccaaccacaaacacccaaactcacaggcagcccaaatatatataatcattcccaacctgctaacccctgaatccacaaacacccaaatgcaccctgaattctacagggacctggacccccaaatgtctgcttccaccccagaaccagccctgtttgtgggtagagtcataaccactcacatgggactccccagagccagggggaggtgggttagtagcaggagcagcaggctgggacctgaggtgggtcccatggtgctgggacagtgcagggtcagagggacagagggacagagggagaggatggggaggagtgagcagcgcctgctggagctggctttttatctggctcctgcctttcccccactcagcccccccttctccccatggcctctccccttttggggctgccccagatttctcaataccatttcctaagcttttcagtccctggggccaacatgtccatggggtgagtaacctgagggcatgttccccagcagcatgaatgcagctgcaccctgccctggactctcccagggtcagggccacctggtgaacacagacctttctctgttggacccactttgtagtggaagaacactaaggtctggagaaccccccaccgcagatgtcttggacctcatccccagttcacttttggccatgcgtttatcagtcgaacacttcctaggaatctctctgtaggctgggagtcagagccccacttccagaggcttccatgctgagggaggggaagtagaatgggggagggacagagcccagcacagaaactcccagtttcatgaaatgttttctagctcatgtgcagggcagggaaaaaaaagaagaagaagaaatgttttccccagtgaaatagaactctgcttcttggagggtcagggaaaacttcctgtaggaggggacatttcagatgggctttgaggtatgtgcaggagttcactatccaagtgagtttattttccaaggaggctcccctcacttacccttgtcaggatgcctgagtgactttggtggtgaaaaaagtcatcactgaggaaagtcctcatttctagagcttttgtacctgtctaatgtcaatatcctcttaggatattaaattgtattgtttgtgtgtgtgtgtgtgtctgtgtgtgtgtctgtgtgtataatatattcatattgatcaacatctaaaaggtacaaatgtgtatagcagtaaaggtggtcttcctcccatccctgttgacagcatattctttttgtgttttcctttaaaaaaatttttttttcattctgtcactcaggctaaattgcagtggtgcaatcacagctcactgcagcctcaacctcctggggtcaagtgatcatcctggctcaaccacccaagtagccgggactacgggtggccgccaccatgcccggataatttttttatttttgtggagatgggggtcccacgatgttgcccagtccagtcttgaactcctgggctcaagtgatcctcccgcagcagcctcacaaagtgctggtgtgaactactgtgccctgtggacagcacatagcacatactattcttcctggtctcttcagttaaatcttgggtttcgttttgtttcgttttttcatgaacaatatacctcagaggctatttcacctcagtgagcaaagaactgcctcattcttacaggttacaggcctcttgttatattgtgagaaagtaaccagcctcctactttttgggggatattttgtttgtttgagtgttttttttttagagtcttgccctgtcacccaggctggagggcagtggcgctatctcagctcactgcaccctccacctcctgggttcaaacaattctcctgcctcagcctccggaatggctgaaattataggtgagcaccaccacgtctggcaatttttgtatttttagtggacaaggggtttcaccatgttggccaggctggtcttgaactcctgacttcaagtgacccacctaccttggcctcccaaagtgttggaattacaggcgtgagccgctgtgtccagccaccagcctcttcttgatggagagactgacatctgtggcttcacaccaggctctctgcagtgaataagcttgaacctgcgttattttctagctctgaaactagctgtgatctttgggtaagctactgattaccgccctgagcctcagtttgttcatggaaaaggaaacccttaccacctgcttcatagagttgtcgttgcaatgaaaggaaatatgttgggtcaatctctgaatgcactggtaatcttgctagatattgccaaattcccctgcacagaagttgtattgatttacacacttatgagccctgcatgaaatgaattgtcagtttcttccacagcctcatcacaagggcatgttgatgaacttgaagatttttgccagccttatgggtgaaaactggtaccctggtgtcattttttttgttttgttttgtttttttaaatggagtcttgtgctgtcacccagggtggagtgcagtggcgccatctcagctcactgcaacctctgcctcctgggttcaagtgattctcctgcctcagcctcccaaagagctgggatcacaggcatgcgccactacacctggctaattttttttttcttttattttttattttttgtatttttagtagagaaagggtttcgccatgttggccaggctggtctcaaactcctgacctcaggtgatccgcccacctcggcctcccagagtgctgggattatagaagtgagccaccacaccccggcagccggtgtcattttaactggcattcctctgacgttctgcagcattgctgcccaggcatacgaggtggatggtgagggcaggagaagggtctgtgggtggggcccccttatccctggagaggcggtttctgaaaccccactgaaggggttaatggggagttttctctgatttcctgtaaaccacattcttttccgtgccaggggtagggggaggcgtggagcatgagaacaaacctggcgtctgtctgcactgattgcgacacactctttggaagaggaggaggaggaggagagagaatgaaaatacctgcttgctctccagaattggggttcagcttttgaaactgcatccccttgccaggcgcagtggctcacgtctgtaatcccagcactttgggaggccgaggcaggcagatcacttgaggccaggagttggagaccagcctggccaacatggtgaaaccccgtctttactgaaagtacaaaaattagccaggcgtggtggtgggtgcctgtaatcccagctactcaggaggctgaggcaggagaatcgcttgaagccgggaggcagaggttgcagtgagctgagattgcaccactgcactccagcctgggtgacagagagagaccctgttgccaaaaaaaaaaaaaaaaattaaaaaaaggaaagaaactggatctcccaattgccccattccatcttctatcccccactttctcctcaagccaccccatttcctggtttcattctagactcaagcattcggcactgtggtttgacaaccttgagaaggaattcctgtctggcctctgtctagcggcaagcctgggttcctcttttctctgagcctcggttaatccaactaaacaatgcgactgaagatagttctggttgttgtgacaattaaagaaaccaggatgcctagaagccaccaggctcagaggggccaggtgtggtggctcacgcctgtcatcccagcactttgggaggctgaggctgggggatcgctggaggtcgggggttcgagaccagcctggctaacatggtgaaaccctgtttctactaaaaaatacaaaaattagctggctaggcatggtggctcacacctgtcatcccagcactttggaaggccgagatgggtggatcacctgaggtcaggagttcaagaccagcctggccaacatggtgaaaccccatctctactaaaaatacaaaaattaactaggattggtggcgggcacctgtaatcccagctactggggaggccgaggcaggagaattacttgaacctgggaggcggaggttgcagtgagccaagatcgtgccactgcactctagcctgggcgacaagagcgagactctgtctcaaaacaaaacaaaacaaacaacaacaacaaagaattagctgagcatggtggcaggtgcctataatcccagctactcgggaggctgaagcaggagaatcacttgaacctggaaagggtctggccctaccctgacctccaagaagtgaccagaggggaggggcaggatgagaagtgagggggttggaggctggagcagatggtagcctactgggagggaaggagggagggagatgagaccgggaattcttcagaacctcgtgacttttttctgggagatgtgcattggtgtccagaggtttgggagggggatagtgcacaaggatgagccagcaggggagggagagaaggaggtctgggtgtgtgttggggtactttccattttgaggcccacccagcccagcattcccggaatcaaggagggagagtgtggccaaccgggctgaccattcgtgggttatctggaagctacatatactgaaaaagtagttgttatttatctgaaattcaaatgtaactgagcgtcctgtattctgtttggcaatcctagctggggtgcaaggggaaaatgagaaggggccagggtgcggtggctcgtgcttgtaatcccagcactttcgggaggccgaggtgagagcattgtttgagtccaggagttcgagaccagcctgagaaatacagtgagacttcgtctctacaattgaaaaaaaaaaaaaaattagcagggcatggtggcgtgcctgcagtcccagctcctcgggaggctgaggcaggaggagttagaggctgcactgagctatgactgcaccactgccccccagcctgaatgacagagcaagacaggaaaaagaaagaaaataagaggaaggaagtgggaatgatttctgggtgggggacccagatgcccccggctcacacctgcctgagttcactcactgtcccctatatcccatccctccccttccccaacaaaggggcagccaggcctgggagcagctgggaaacccctatcccatcgtctaattccaggctgaggtggctgctttcctagaatttttctccagaacccacagcaaggccatccccttcttccaccctattactgattaattcaagttaaccttgacctgactgactgaatcaatctatctgcctggcaacaatggctctttccctcctctccctctggtacactcagcagaaacaagctggggccctatagactcccgccctgggaaaatggagagcagtgggttttgattccagctctgcagggcccctgggaaggtccaacccctcctcccagcctcggttcctaatctatcaactggagatgcacagcctacagcctcctttctagtcttggagtggaagtcccaagtggcacccaggaaacaatccttaacccagcgccctgcgcatactgagcgctcagtacacttgaactgtactttttgtttttgttttttgagacagagtctcgctgttgtcggcctgggctggagtgcaatggcacgatcttggctcactgcaacctccgctgcccggttccagcaattctcctgcctcagcctcccaagtagctgagattacaggcgcccgccaccgcacctggctaattcttatatttttagtagagacagggtttcaccatgttggccaggctgatctcgaactcctgatgaactgtatttttatttttgcaaatacccgtgtcttctaccccagccttgcttgggtgacggccccaccaggcttccaggctggactccttccttcctctcattcccagaattcacctgctggccaagcccctgcctggaatctcccagcttatcctccctctccacacctgtgatctctgccctcacctctgccccagcctcctccttaccagcccatttactctgcagcagctggggacgctttacttttatttatttaatttatttttctaaattttatttatttatttatttgtgagacggagtcttgctctgtcgcccaggctggagtgcaatggtgcgatcttggctcactgcaaactccgcctcctgagttcaaacaattctcctgcctcagcctcccaagtagctgggatgacaggcaccagccaccacgcccggctaattttttgtatttttagtagagacggggtttcaccatgttggccaggctggtctcgaactcctgacctcaaatgatctgcccatctgggccttccaaagtgctgggattacaggcgtgagccaccgcgcccagccttattttactcttttaaaagcagggtatggccctgtcgcccaggctggagtgcagtggtgccatcatagcccactctggcctcaaactactgggctcaagcaatcctcccacctcagcctcctgagtagctgggactacaaggtgcatgtcaccatgcctggcttggggactccttcctttctaaaatccacctttgggccaggcgtggtggctcatgcctataatcccagcactttgggaggccgagatgggtggatcacttgtggccaggattttgagaccagcctggccaacagggtgaaaccccgtctctactaaaaatacaaaattagccgggcgtggtggcacatgcctgtaatcccagctactcgggaggctgaggtgggagaatcacttgaacccaggaggtggaggttgcagtgagccgagatcgcactattgcacttcagcctgggcgacagggcgagactgtctcagacaacaacaacaacaacaaataccctacctttgtattcctttgaccgatcatgagcgcactgacgctcacaaacgcctatgagatgcgggtggcagcaacttatctatttcacgtattttaacccttgtttatgccacatgccataggttctatcattgccccattttacagatgaagaaacagaggctttggctgcttgcccgagatcctgtggctggtaagtgccggaatctgaactcagagagctgggccctatagagtacgtgcccttaaactgcatgagttcttaactgctgcagcaaaagatgactgcaaactcggtgcgttaaaacaacatgtttcttatcttacagttctggaggtcagacgtctaaaatcaaggtgtcaacaggactgtgttcccttctggaggaaacagatgaacccatttcctcgcctttttcagtgtctaggagccgcctgcattccttggctcgtggcccctttcttggaatcactgcagtctctgcctttgtcactgagtctccttaactctgaccctcccacctccctcttataaagacccctgtgacgatattgggcatatccagataatccaagataatctcccccattttaagagccttaatcccatgcacaaagtcccttttgccgtgtgacagaacatatcatatccacaggtcttgaggattcagacgtgcacaccttttttttttttttttttttttgagacaggtctctcgctctgtcaccaaggctggagtacagtggtgcaatctcagcttactacaacctccacctcctgggttcaagtgattctcctgcctcagcctcccgagtagctggaattacaggtgcccaccaccatgcccagctaattttttatttttagtagagatggggtttcgccatgttggccaggctggtcttgaactcctgacaagtgatccgtctgcctcggtctcccaaagtgctgggatgacaggtgtgagccaccacacaggctggacgtgcccatctttgaggggaccatgactcagccgactgcagcatgcacatgcagtctctctggccatgctcctccctgctttaaattcctccatggctcctgtggacccctggatgaagccccatgtgcctgcctgtctttaggcctctgccagcttctctcgccctcctcctgccccctccagcctcgcgggccatcccagccttccccgccgtgttcatgtaacttccccagtctgcaatgcctcccacttccttctttgtctgaccaggctatttattcatctgggccccagctatatttgtttctgcttacaggaagccttcaccccagccctgttccctgccgctgtcccatgcttgtgtctccagcgaggaaggcttctccgagctccaaaaggcattctggatgctctagttgaagggcaggtgggtggggggtggagacccatcttgggaacctgcccttaagtgtgcacacaagcagatctccaattcctcagtcgcccctcaagattcagggctggttccctagaaatcaggtcgaggctgtgcagctgggtgctgtgcctgctattgtatgtgatactcaacaaacttaggaggccccatgttatatgcaaggaaacagagagagtaagccagtgatccagggtcacacagcaaatggcaacaggctgagagatttggtcccagggagtctagctatggagcagcaatgcatatagtcagtgtctggctttgagccgggagtctcccactcactcatgagctgtgtgacctcaaggaggtttcttaccctctctgtgcctcacaggctttttaacaaattaaaatccacagaagccttaatagacagcgtggcgtagcaatcactctgtgttacctcgtattattttttcttttcttgagatggggtctcgcttgttgccctggctggtctttaactcctgggcttgagtgatactcctgcactgacctccgagtagctggaactactacaggcacttgtcactgtgcccggttagcttctattattattatttgttttgagatggagtcttgctctgttgcccaggctggaatgcaatggtgcaatctctgctcactgcaacctctgcctccctggctcaagcgattctcccatttcagcctcctgagtagctgccattacaggcacctgccaccacacccggcaaatttttgtatttttagtagagacggggtttcaccatgttgaccaggctggtctcgacctcctgacctcaaacgatccgtccgccttggccccccaaagtgctgggattacaggcgtgagccaccacgcccagcctattctttcttttcctctgtagcctgagccacttgggggccttcaaatccccgttctcccctcgcccccagctttcatgcccgcggttccctcatctgggcatgagctcttccgccatgtttctactgacctttcctgacccccaaggccgggtcagagccctgtgcagttcccgtcacggcgctgatggcccagtgatggtactgccaggtgacatgtccctctgcctgacccccactctgggcactgggagcccctttagggctgggaccaggtgggtctttgtgaccgctccgtcccagcgcctggctttgggccctgcatgcagcggttactgaatgaatatttattgaatatacaaagacacggaccctgtgcccgcgcccccgccacacacagcgaaaacaggtttctacattgtaaacacaacctccgtgtagaccccaacccccaaaaaggcaagacaacggcgtagccaaacagattggtcattattgtacacatagctggaagggaggggtggtcccggggtaaggacagggctgcccaatatttggggggaggaagggactcttcttccaaatgggcttgtccgggaaccggggtcccggggagctgggcgcctggtccacatggaccccctccacctccccacatacgctgtggaagaagggcaggagtgagaaatgctgggggaggacgaccctttggtctgagatgtggaggtgatcataacagttcccgcccgctggctgttttgttgactttggagaggccttcccggaacccagagtccgtcattctgggggcagacagcgaggaggcgtctagcgttgcagggcagcaggccccacccactctacccggaaccactcaggccccgccccactccccccaaccacagcagccctggccttgcccactctaccccagactcacccaggctgcacccacctcgctcccacagcagcgcaggccctacccttctactccaaccacctaggccccgcccccagcagccctggccccacccactctacccgtaaccactcaggccccgcccaccttactgccatagcagcccaggccccacccgttctacccgaactacctaggccccgcccacccccgcccccagagcggccctgggtgtctccctagcggccctaaccccacccctagctcagcctggccttaggtactccacagctgtccggtccccacctgcacagctgccctggctgccccccatctcccctccatcccttctcaacagcaggctctgccctaacactgcccccagggctgctacagtccctcccccctgcccaccctgcccgtagagctgcccaccccctactccacccccagagccgccggccctgcccatggtgcccagctcacacttgctccatctgaacatcctcctcgtcctcctggggcagctgcaggtacgggttgtttcctgtgggctggaacttgtagcccgtgagcacgaagaaggccagggtggagccctccaccaagagctgggggacggggcggagtgggggcgtcaggcgcacccccacccccaccgtggccgccctcccgtcccacctgggcctcgggctcacctggtacagccactgccactgaaagggcacagccacctgcagcaggatggcgatgatgcgggtgaagtagacgtagcagatgacctgcaggggcgcgagcaggcgtggggccaggactgtaggggcacgggcaggcatggggctagactgcaggactgcgggctggggagcctggatgggggcctcgggatggggcagcagctgaggggctggggtgggcgtgcagcaggccggtaatccccccaaacccgctgtgagtgaggcgggctcctaccatgacatagtaatgccggaacagcttcagcttggccaggttcactgccactgagggtgggcacagagagggcggtcaggggagactgagggtgggagggaggggagggggctgggggctgggagaggtgacaaacagaacatctgagggagtgtccaggagcagcaagtctcgaggggacattaggtggggcagaaaggcggaagggggagatcagagaggagggaagggccacccaacagggcagagaggccagataaaggcattcgggggaaagagaggccagactggggcatccagggaggcagaggcctgggggctgggcagagaggccaggaggggcatccaaggggcagaaagaagggcccggaggaggaatggggccatgagcagagggcctgcaggcgcagggcctcacccttcccgtctgtgccagacgcatcctggagatgccggatggacctgggacaagtggaggacacagggtacggtcagcgcggacatcgcccatgtgcacagggcagagcctcagcccgggggcagggtcctcaccagactacggggaacaggatggcaccacagcagatgaggtccaccaggaacaaaatctccttccacagcacgtagtcgctggcgccttcctcgcgggactcgatgatgatgtaggccacgttggccaggacctgcgcaggcggcgggggtgggtgggcactgcctggcacgctcccctttgcccccactgccctgtgcagccctccccgccctgctccggaggctgctccatccgcacctgcatggggatcacgatcccaaagaccttcttctccttatccgacaggacgtacttgatgaaggcccagcctgagccaatcagggcgatggtgatgaagaggagggcgcccttcagcctgaaggagcaggggagggcgtgatgatgaggtggggggccaaccctcccctgcctgcctccccccagctgcccagcagagtgggggacactcacaggtgtgcgatgtagtacatgacggcaaggccttcgatggggtggccctggctgttgatgaagtagtagttgatctgggggtggatggacagacggacagtgaggcgcacagaggggtgggaggctgatggtggtggtgggggattaggaacacggaccgtcaccatcagatgggtggtcagaaagttgaataatgaggacggtgggtgggactcaaaactggtaatcggggctgaaaaaatggagggaacagtcacagctgaaggggtgaatagttggacaatcagagacggacagtcacagctgaaccaagggacagtggtggacagagctgccccgcaggactggtggacagaggggatgggtgactggccacactggtaaaatgggtggacacgtggatagctggcggatggccctcccacaggcccagggtctgcagagatttgggggatggcccgggtgggcctttcagcccaccccccgctgctccccggtccaaggctctcacgctgtggaagaggagagagatgctcttggtgaaggccaaggccgccatgagccagtggatcttgaagacgctgtacctggtgggagggtcagggagagatgggggtgcggggcatcagcagagcatagggatgggggtctggtgaagggacgtgggggaccctcaggggcaggggcattacgtgttcctgcagaggatggacacccagaagatgccagcggccaggaagcaggcggacatgaccatgtagagcttgaaaaggggcatctccgctgccgacaggaagccatcggggttcttctcccggatcatcacctgcggagggggcagtggtgggcggcggcaggggcacagcccgaccgctggcctgggagagcagcgagtgggggtctccagctctctcactttctactgggccactcatccactctgagcctcagttggccccgtctctcaaatgggtataacagctcctacttcgcacccgggagggctgggaaaagctaagcggggtgaggcactctgggcccgcagtggcctgcagggggcgctccctggccctgctgccctccactccgctcaccgtgatgtcgaatggatgctcctttcctggcactgaattgttgcagttgtggaagttcaggctgtactggccttcttccgcctgagagccgatcaccacgtggaactgggcgggcggggagagaggagggctcagcctgggggacccgtggtctggggcgacaatcagcttgggggtcccatggtctggggcgatggtagggctgcaggagggctcagcttgggggtcccgtgctctggggtgacggaagggccgcaggcgctgcaaacactcacactgaagttgtaggagttgttgaggtggctcaggcccaacaccaggtccttgtccttcccactaggaccctgaagggacagagcccctccatcagctggttctgggtccccgcagggccctggggtgtgcatcttccctcctgccccgcctccccgaaacctgaatcactgcgggtgttgacttgggcttgctggctgcagaggtccctcctgtaagagaccgggcagtgattttaagagatggatggatggatagaggggcagtgggaaaacggcatggggagtgcaaagggcagacctgcccatccacccccgtctgcacagccagcctgactcaccgccatccaccttgcgggggactgtggcctgtggcttcgggagccctggtttggagggtgcttccgggaggagcccgggaaagataaacaacgtcttctgctctccatacttccgcacctggaccctggggtgagggtggggtggggcatgaggctggggggctgaacttggctcaggcaccggcaaaggactcagtggccccttggaccctctgcgtgtcctccctgaggggcggggtccagtcgagtcagttatcactgagtttcagcctttggttcccaccggtcaaggaggctgccgccttcctgtgctgcctgcatccgcagttattcgtcatttcccatgacatcaatctactctttttctcttttctttagagacagggtcttgctctgtcgcccaagctggagcgctgtagtgcaatcacagctcactgcagcctcaaattcctgggatcaggcaatcctcccacctcagccacaggagcagatggaaccacaggcgcacaccatcatgcttggctaatttttaaattttctagagacaggggtctccctacgttgcccaggctggtcttgaactcctggcttcaagtgatcctcctggctcagccagtctcccaaagcactggaattaatggcatgagccaccatggccagccctacattattattattattattattattattattattattattattattattttgagacaggctcttgatctgtcgtccaggctggagtgcagcagtgcaaacttggttcactgcaacctccacctccccagctcaggagatcctctcacctcagcttccagagtagctgggactacaggcgtgcaccaccatgcctggctaattcctgtacattttttggttttttagtaaagacaaggttttgccatgttgcccaggctggtctacaattcctgggcccaagcaatccttttgcctcggcctcccaaatactgggattacaggcgtaagccactgcctggccctaagtatattatttaaaaagaaaacattttatctacagaaaagcaacatggttttgtcagaccctggccccagaatcccagttcctgggactcagttttcttgtctgaagagcggagatgatcacaggataaggaatgggtgagttagtgtattaaagctccgggacaccggaagcactcaacatgtgcgaacaattgttattcattctcacaacaaccctctgtatccgggtcttctgccctgagacaccaacacccgcggagtccctctctccttccttccaacaatcagaagacttgaaggcaaaactaaaaagtaagtggctttctctctctgcttctcatcccacctgatcagcccaggtgcgtgtgggcatcacaccagggaaacgcagacgaaggatctgagcgagcccccggtccccaactcactgcagatccttggtgttgatgaggaacaggaccaggaaactgctactgtttttctggagagggcagtcctggaaatcccgggtctggggggtgggcaggagggagtgagtcttggttactcctctcctggtccagctccaccctgtctccctccctgtccacccacgggatcttcctgctcctgcctctgacaaagaacaggggcccttgggttacagatgcagaggacagaccctaccccctccctccagccccttctcccgtcttccccatgccctccactcactgaataggagcgaactctgccagaccgaacccggctgagactgaaccccacctggtgggtggaaaaaaaaaggggagggtgtgagggacagtagagacctcccagctatccctttcagtagcaatagaaacctaacctcacatttactgaacacctaacatgtgctagatcccacacgctctttttcttttttagagttggggtggtgggtggacctcattctgtttctcaagctggaatacagtggcaggatcatagctcactacagcctcgaactcccaggttcaaacgatcctctcacctcggcctcccgactggctgggactacaggcacacctcaccacgcccggctaattttaaaaactttttgtagagacggggttctcactatgttgcccaggctggtcttgaactcctggcctcaggcaatcctcccaccttggcctcccaaagtgctaggactacaaagcctgagccaccgcgccccgcctgtcccccaagtcttaagaaaagtgcctagcacatcctgtgtaagacatcattactcccaggtacagatgacgaaacaggctcagagagatgacgggacttgtacaagatcacatgggtagcggcagagctgggaacccagaaccgggggattgcaccgtgctctcctccagcaaactcctcaaggtccctcaccagcagggacttctcttctgcctcccggaggcccagccgcaggacgctcaactccacctccagagagccattggtgtagaaaccgaagctgttcagctggatgtccgctcgcttctccccctgccggagaccaaggaggcagaggcagttcagacctctttccgcctgcccagccccaggggtctggcacgaggacctccagaagggcctcctggtacccctctatttaggacaggcccagaggatgacaagagaaagttgagagggacttcctccctgcaggggaagggtggtcctgcattctccgacctctgttctgagaacccaggaacagagatcctgcggcacctggaagtctccccactggggtgagcaccgcccggagaacagttattcacctcggcgtgcctgaccttcaccttcccgaagaacttttacattccagttgagctcccagcaatatttcaacagaaccccccaaatcccattaagtgcccagaggaccccactctatagccccccaggaccccgctgtgcggctccagggtctctagcgccccaaaagtgattccaagaatttaaaggactaagacccagttggggggaaggggggtgtagtccccaagagatggagcctcgcccccgaagggagggggccgaccccagcgaggcggacccggcaactccatccggaggaccgaaggggatcccgggacgagaccactccgggcccggaaacggggggcgccggaccactccaccgcctcggggacgggggagggcggacgagaccactccaagccagggggcttctccgagacaaagttgcgccaccgaccccagaccctcgcgcggcgggcctcaccgtcagcgccagctggtggatgcgcccggagcagccacccagcagcagcaccagaagtagccgctgcccccactccgcggggctcccgcggccgagccccctcctctcgctcactgccatctctggagccacctcctccccgactccgcctctggcgcccaagcccgcccaccgatgagccaatcgccgcacggcggggcccggcctttcggagtttccagtccgccaaccaatcagcaattgcctctccgcaagcccgcctgcttgcgtcaccgacggacagcaccggttccgaatgggagagccgataacgcttaacccccagctcactctcaccaatcgctataaagattgtccggatgtgatttaatgagcagtttatctaaccaattgtcatggatctgatatccggcccttaaagcggaatttctccacccactcttaactgtccgggactacattacccagaatgcagcgggagcagacaagggccacaaagcattaaataaactacctttcccagtatccccaaggacggacttcctcttcttgagccagggatgtggctcccagccagagctgaggcttttggtaaacacacgcatctgttcaggcctgacctgttttcctaatcttcctggtccacagagaggcctaaagctggcctcaggttaaagtttgaccctaggatgacctatgaccccaggctgagaccccagccttaggctaagccttttattccagagtgaggcaattggagccccacccccagattccaggctagaccggactccgggctgaactctgaccccaggtgaactccctctctgcaagttgagtcctaacttcagcctgaaactctgacaccccctcgtcccccacaccacacactgaggcttaatctctggtttaggccaccgatctggactagccctgactccagattggacctgaccccttaccgggttgctaatccttctggttaagcctctggcctctatcccctatccccacggtggtgctgacctggactgaaccccaattccagtttgagtctctgagcagaggtgaactcagaactttgctaggctgagcccccatttgagactagccacagaactcactgggttcaattgcccaactgcaatcagacattttctagctcagaagccaccagcaggtggggccaggtctcagcagagacatcagtcccagtgtgggctcccaaggctctcctcctgggctcagctgtatctctctgttctgggagcctgggtgctctgtgtaaggggaacgtatacccaagggcccccctgcaagacgcccagccttgtctgaggctgcagagaaagcgccaaagcccggagagaatgggagtgggaatccccagtgcctcctctcctctttcattccagcacctcaaagggatttacaaggtgtgaacagacttttatgggagaggtgacagacttcccttctccagggcccagatggcccagatgtctgggggaggggcggagtcggaatctcaggggcagtactgagaatgaaaccaggttaaactggaaaatgggcagatgcaggcgcgaactggaaggcagctggggaaaggcctgggcctggcgccccaaggacggcctgtcttcagtttcccagcggagactctgggggagggaaggcaggatgcggtgcgggagttaatggacctggccttggcgaaggcgcgtcctgggttggatcgaaaccctctcatccgccctgtggccggagggaccagaccattagtgggacgaacctagacgcctggagccgggccggctcgcaagaacggggtgacctcaggttgcccctgcaatggggttgaggaaggacttcttgagtttggggttttagtgtcttggccctttaaggaataattgcggggaaaggggaaaaggagatgggaagaaccgtttggagcggggaaggaagatgagaggacgagagggaccccggggatttggaaaaaatgggtgggggttctttaaggggtcggtccagcggcgtcgagtggcaacgttgctttaaaagggggcggagcgtccgttgggccccgcccccgaatcgcagtgcttgggctccgcgcgggtgggggcgtggcagagcgtgcaggggggcggggaagagtctggggtgggcggggccgggcggggcggggcggggccaggcgcaccgccctcggctgagtctccccggggagggcggcgggcggcgggcggcggggaccgggtgcggtggtggctgcggcggcggcggcgggagcagcatggattggggcactgagctgtgggtaagtccaatcggcccgcctctaagttcccctttgctggggtccaggcaccccccttttgtccccaatgtatcttagagggggctccgcgcctttcccttccaccgacccctgggtccccgccctccaccctccgctctctctcgaagtttatctgggagtctcagcacgctcaggggcgaagggcgactttgccggaccggagtggggaaactgaggcacagggttgcgaatgaggcgggcagaaggaatcctggggccaggccggggcggctgagagaggtcacctattttgggcgccctggccgggcaggcggcttatcttacggcccctgggtccctgcccgtcgtccgcctgtccggctaggaggggggaggggaccctctggtcaccctcatccccacccacgtgggacctagaagtcctgaccgccctttccctcgcctttaatcaacacctaggggctggggacgctcatggaggggaagggggatgctaagctcggcctgatccccctccctggcttccccctgctcaccccaggcccagggcgggaccgccccctggtcgcctataacctcagccctggaagccccagaaatttccccctatcctagccggacctctgacccctccccttgctgggggcggtggaatccctgagttcttagtgcagcgggggtaaccagactgccaccccctcctccaattctgcgatttcttttggatgtgtagtggggtcagtggggtaaattgagtcacccatcgggggatccctggaagcagggagattcagggaacctggtgcctgccccctggccactcaggggcccccagtctgccaggaaccctgcccctctggccttgactcacgccgggccggccggattttccggaatccggggggattaggggagcccgagctgggggagtggccctgtccccttccacgcccctcttggcggtcctatgtcggagacctccatctcccggccggggtggctggggcctgggcgctgttctccggcccttcccgggaaggggagggggttcccgccagtttcctgcctccccccgcgccacgccggggcggcgccgggaagccactccttctaggagcgcagagccttggccctccctgggagtctggtcggcgggctgtggggtcccaaaatcgtgaccccggcccctctcccctcctcccccaccatgtcccatgtcaggatcagttcgaggtgctcgagcgccacacgcagtgggggctggacctgttggacagatatgtaaagttcgtgaaagaacgcaccgaagtggaacaggcttacgccaaacaactgcggtgagaccctggggtggacgctacggaggacgcgcctggggcgacggggagcggtgggagggctgcgggctcagccctcctacctctgtctccccttaggagcctggtgaaaaaatatctgcccaagagacctgccaaggatgatcctgagtccaagtaaggttggagaggggctgcagggctagatttgtggggaaaggcggtgcttgggtctcacttcccctccctcagctgggacaccccaccgctcctctcacttccccttctagaggtgagagcatggatgcaagatgcgggattatctggcttggaatcctgagtccactactatgtagagaaattgacttgggcttgtgactcaggttttctgccactattttccttaactgttaaatacagaggccccagcagttacaaaaccagtaactttgggcagatgacttaaagttttgcgcctctgttttcctcatctgtgaaatggaatgatgacgattcctccagctttgtagggctttcatgaacacgagctgagtgaatgtgtttaaacagtgtgcagtccatatcaaacgccgtaaggagcatttgacttggaattgagtccccaattccaaaatccaaaaaagccctggaaatcaagttgttttggtcacttgtttggcagcaatctctgacctgaactttttgttaattgtagttgttttgttttgtttttgacagagtttcactctgtcccccaggctggagtgcagtggcgccatctcagctcactgcaacttccgcctcccaggttcaagcgattctcctgcctcagcctccctagtagctgggattacagtcacctgccaccatgcccagctaatttttatatttttagtagagacagggtttcaccatgttagccaggctggtaattgtagttttgacttttatcccacttagtgtgaatgttaacacctctcattgtaaaattaaaaaaaaaaatagggttgggcacagtggctcacacctgtaatcccacacattgggagggtgcgcaggtggatcacttgaggtcaggagttcgagagcagcctggtcaacatggtgaaaccttgtctcttctaaaaatacaaaaattagccaggcgttgtggtgcgcgcctgtaatcccagctactcaggaggctgaggcatgagaatcgcttgaacccgggaggcggaggttgcagtgagccaagatcgcaccactgcactccagcctgggcgacagagtgagactctgtctccaaaacaaatagatacggtgtttgattacaaaatgatgtccccaaccccactaagatgatgcagaaaagatggtataagctttgtacaccatctttaaaaactggaaaattctgtgttccaatatacattcgaggtccagtgcggtggctcacacctgtactcccagcactttgggagggtgaggcgggaagatgcggagttcggggggattggagtttgagacctcatctggaaaaaaaaaattagccaggtgtggtggcgtgtgcctgtggtcccagctatttgggagcctgaggtgggaggatcacttgagcccaggagtttgaggctgcagtgagacgcaatcatgccgctgcactgcagcctgggtgacagcaagaccctgtctcaaaaaaaaaaaaaaaaaaaatctactcaagggttggggttaaggaatatggaccagaatttgtcatcgcttcagggattacattcttggggcttaacccttttccacctggaggtgcgtcctggggcatcagcctgctcgggaggaggggcctgactccctgttccccgattctcatccaaccccagattcagccagcaacagtccttcgtacagattctccaggaggtgaatgactttgcaggccagcgggagctggtggctgagaacctcagtgtccgtgtatgtcttgagctgaccaagtactcacaagagatgaaacaggagaggaagatggtgaggagccccccgattcaggttttacaaagggcttctgctggaaccctggcgagccttatcactcttctttctgtagcacttccaagaagggcggcgggcccagcagcagctggaaaatggctttaaacagctggagaatgtgagtttgcagaggtagcagtgactgtggcccggaggcatgggggcagggttgcggatccggagtcagggagctgccctctttgtcagacctggaccttccctcccccataggcttccagtactcccttgacccctacttactggatgacatcccaataatccctgaaaccttggtttcccaccctgctgtctttgggatggtggctccctcactccggttctgtcccctacacagagtaagcgtaaatttgagcgggactgccgggaggcagagaaggcagcccagactgctgaacggctagaccaggatatcaacgccaccaaggctgatgtggagaaggtgtgtgtggcgggggcggggggggggtgcggggtctgggacaagcttggggagtccgagtgggacgtgatcggaacctggcagtaccttccacctctgcattcttcaggccaagcagcaagcccaccttcggagtcacatggccgaagaaagcaaaaacgaatatgcggctcaactgcagcgcttcaaccgagaccaagcccacttctatttttcacagatgccccagatattcgatgtgagtgctcccagttctcagacctaccttcccgaaagcctccaaatgttagccaactcctacgcattcatcaaaaccccagctgcaatgtcccagtccctagattgaaagggaatcagaaacctatagtaacagtgagctgtgcttttagtcagctgttcttcctgctgggcatgccttttacttgtttgtttatttacttctatagagagatggggcctggctctgtcacccgggcaggagtgcagtggcataatcacagctcactgcagcctggaacccctgtgctcaagtgacctttctttctttttgaaattcctacttattcttctaagctccacctctaacaacccctctgaaaggtctcgaatttcccctctcctgtttcaatctagcgctccactctctgtcccatccgtggccctgggagtatcagggctggttctgctttttcttcaaatccctgttcccttgtctcctcctttgagaagcctttgctgaccccctaggcacgcgtccccctctgagatccccctggccctgtgtctcttccccaaccacagtgggctggagtctctcttcccgactctgtcttcccctccagactggcttggggctggggccagcgtggagcgcgatcatatttgcagagtgaatcactgtgcttctagtccctctgttagcacccctgagccacccttgtccctgtccttacagaagctccaagacatggatgaacgcagggccacccgcctgggtgccgggtatgggctcctgtcggaggccgagctggaggtggtgcccataatagccaagtgcttggagggcatgaaggtggctgcaaatgctgtggatcccaagaacgtgggtgcctggtctgggtccactgggctacgggaagggcagagggaggtacccataggctaggcactcgactgctcatccactgtccccctcccccaggactcccacgtccttatagagctgcacaagtcaggttttgcccgcccgggcgacgtggaattcgaggacttcagccagcccatgaaccgtgcaccctccgacagcagtctgggcaccccctcggatggacggcctgaactccgaggcccgggtcgcagccgcaccaagcgctggccttttggcaagaagaacaaggtgggggccgggacccttgggatggtgggggagaaggacagtgaagtggggacagtggggcccctattgagtcagccccagccgcctgaacgccgagtctcgggcaggaattttcctcttggctgccagcccggactggagggaaggaaggcggccgattggcctgggagtcccccgaggcgaaggcgggggcagggtggggaggtggggaggtccgtggcgtttgtctgctgcttctcgggatgctgggagaaaacctgctggtggaattcagggctggcctgagggctggtgacaccatccctggggactccccgagtttctctctccatcctgctgatgggactctgggagccgccctgcatgtcttgctttcttgggtttttggattttaatataccttagcacccttggtttatacctttgatttatactttgggtccctcttcacttacactctcatacctctccttgacttaacacctgtgatccccgagcttaaacttctgatgcccctaacccctctcattttcctgccttccactccctctcggcttgtggttttatttttgtttatttatttttgtcctctgtggcctcttacctgtctgagaccttgattcctgcatgcgtcttctagactgtcagcccagaaagctaagtggacagagagacatgggcctccctgcctcctggacccatgcttgctcccggacataacattccagagacctaggagataccgggggagtgagagttctggctttcgggcttacagttcaacatcctccccgccaccttccagatttttttgtgtcgctcctgcatgcgttttctctgtgtggttgtgcatcttgagttgtggttttcttaccgttttttttctttctccattttgtttttcctttttcctttttttgcgtccatccgtccatccgtgcgtccatccctccgtccattcgtcctcactctctacatcctcctatgcccccccaccccttcaacctatccccctccccggcccccgccggtagcctcgccccccacccctctcccccctggggggccccgtaccctcggcattgcctaacggacccccgtccccccgctccggccgtgaccccttggccatactgagcgagatcagtaagtcggtcaaaccgaggctagcatccttccgcagccttcgaggcagccgtggggtaagtgaggcctcggggcaggaggaggtggtggccctagcctgcccagcggcgggtggcgggaccctgggctcgcttcctgccgctggctgggcccctcttccctggttgcccaacccagacctgctttgctctgtgcatggcttcgctgtcaagaaccatggctggggaagggagtgaaatatctcagacgggtgcagagtctggcaggctagactccttgatcccaaattcagccctctacccaccttgcagacagtggtgaccgaggattttagccacttgcccccagagcagcagcgaaaacggcttcaacagcagttggaagaacgcagtcgtgaacttcagaaggaggttgaccagaggtaaggtggtggggtagggaaggacaggcaaggaacatgataaaatagtaaatgaacttcacttatttgtttattattttattttatttattttattatattttattttgtgacagggtcttagtctgtcgtccaggctggagtgcagtgctgtgatcttagctcactgcaatcgccacatcccaggttcaagcaattcttgtgcctcagcctgccgattagctaggaccacaggcatgcaccagctaatttttatatttttagtagaggcggggtttccccatattagccaggctgtcttgaactcctggcctcagttgatctgcctgcctcagcctcccatagtgctgggattataggcatgagccactgcccgggtctgtaaatgaatgacatttaaatggtactcaaagatctccccaataatcccaaggccccgacggttttacaggtgattcctaccacacttagttacttcttggccaggtgcagtggcctgtgcctgcaatcccagcattttgggaggttgaggcaggaggatcatctgagcctaggagtttgagacctgcctgggcaacagagtgagaccccatttctagcaaaaataaaaaaattagctgggtgtggtggtttgtgtctgtagtcccagccacttgggaggctgaggtgggaggatggcttaagcctgggaaatggagactacagtgagctgtgactgcaccacttgcacttcagcctgggtgtcagagtgagaccctgtctcaaaaagaaaaaaagaaacagttacttcttgtcttatacaagtcattccagcaaacagaaaaagtgtgaaagctgtcaacctctttaggctgaagaatcctgattcccaaatctgtggccaagaattcaataagataaaattaagggctcattttaccttatttatgatcatagaggcaaaatcctagccaagcaaatccagtgtttaaaaaataatacatcactttgggaggccaaggagggcagatcacgtgaggtcaggagttcgagaccagcctgaccaacatggtgaaaccccgtctctactaaaaatacaaaaactagctgggcattgtggcacgcgcctgtaattccagctactcgggaggctgaggtgggagaatcgcttgaacctgggaggcggaggttgcagtgagtcaagactgcaccactgcactccagcctgggtaacacagcgagtctctacctcaaataataataataataataataatacattagccgagcacagtggctcatgcctataagcccagcactttgggaggctgggtagaaggatcactcacttgagcctaggagttcaaggccagcctgggcaacgtagtaaaaccccatctcttagaagaagaagaagaaaaacccaagtaaatttttttaaaaactaaaaaaaaaaaaatccaccattggttgggttttatcccaataatgcaaagatagttcaatatcaaaaaatgtatccatctagttcaccacattaattggctaaaagaaaagcagcatatggttatctatttaatagctcaaacacttaaaatattgacaataaaaaaatctggcagattaaaaaaaaaatctttactcactctttccaggcaacaaaatcctcttcccagttctgttacataataggaatgatgtttgccacttgcaaacaggcagccaaattatattttgccatttgcatgtaacctcttggacagaatggcttttattggtgtaaagttccattcagaactctctagttcctgagtttctacggtggaggggttaagggtgcatgttctagagtcacgacaaactggacttgatttccagcttcatctcaggacttgggcagcctgttttaccttttaattcctcagtttcttcatctgtaaagtggatcaggtattagaactggaatgaagttggcagggtgcagtggtttatgcctgtaatccaagcactttgggaggccgaggcaggcagatggcttgagaccgagtttgagaccagcttggccaacatatggaaatcctgtctctactaaaaatataaaaattagccaggcgtggtggcgtgtgcctgtagtcccagctactccagaggctgaggcacgagaatcacttgatcccgggaggcacaggttgctgtgagccgagattgcgccactgcattccagcctgggcgacagagtgagactgtgtctcaaaaaaagataaaaaataactggaaggaagttgagctcagatctggtcttttccaaaggtccattatagtcgtgactacctgtatatatagacataggggagacagggatgagaaactgatgataatgataacagtatttattagtcacttactgcattctaggcactattcgaaacagtgtacatggatttattcgaattttcaaggtttcctgagagattgtatgcagacttaagatctgtcttgtttagtgttatatttatctttatttattttttcccctgcccccccttctttttttattttttaaaaattattttgattttttactagagacaaagtctcacaccattgcccaggctggtcttgaactcctggcctcaagtgatccttccacctcagcctcccaaaataatgctgggattacagatgtgagccaccacggccagcccagtgttatatttctgatgcttggaataggacctgtatgcagtaggtactcaatatgtatatgagtaatagtgaggacttactaggtatcaggcattgtattaatcctcacagtgacccacatgagatattaggatcattatctccatttccaaaataagcaaacagcagtgggggttcaatgatttaagccaagctcacacagctaggaaatattcaaactgagattcgaacccaggcagtcgggcactagtatttgcatccttaaccattgtcctgccttgctatttgctccttgatgcaaaacccctgttttttgcttgttaaatcacatggagcccggtgctgtggctcatgcctgtaatcccagcactttgggaggctgagccaggaggatcccttgaactcagcctgggcaacatagccagaccccatctctactaaaaatttttgaaaaatcaggcgagtgtggtgatgcgggtctatagtcccagttactcaggaggctgaggcaggagtatcacttgagcccgggaggttaaggttgcagtgagccatgattgcaccactgcacaccagcctggggaaagagtcagaatgagaccctgactcaaacaaaacaaaacaacagcaacaaaaaaactcacacggaagtatgttttcctgtctatcctgtctcccttgtcatagggaagccctaaagaaaatgaaggatgtctatgagaagacacctcagatgggggaccccgccagcttggagccccagatcgctgaaaccctgagcaacattgaacggctgaaattggaagtgcagaagtatgaggtcaggaaagaccctggggaggggcgggagccagcgggcctggctgagtcactgctgggtggggtggggggtcggggacaggggaggtgttcggagcggggggtctccagctgttttccatcacagccttggctgtgcgtgggtgatctcagggaacctctgggtccaaagtgggctgaccccggagctctgccctggaacgattttcctgtcccctcctcccaggcgtggctggcagaagctgaaagtcgagtccttagcaaccggggagacagcctgagccggcacgcccggcctcccgacccccccgctagcgccccgccagacagcagcagcaacagcgcatcacaggacaccaaggagaggtgaggggtgacgtcagagtgggtctgttcccagggtcccaggagggcctgtctttatctgccgaattatccccaaacagctctgaagagcctccctcagaagagagccaggacacccccatttacacggagtttgatgaggatttcgaggaggaacccacatcccccataggtcactgtgtggccatctaccactttgaaggtgagaacggccagagtgggcttggcggggtatgggaggcagtgtctctggctaggttcagtttaaattcgcctaaagcagggctgggcgggtggctcaggcttgtaatcccagcactttgggaagctgaggcaggcagatcacttgaggtcaagaattccataccagcctggcgaacacggtgaaaccccatctctactgaaagtacaaaaattagccaggtgtggtggcgcacgcctgtgatcccagctactcgggaggctgaggcaggagaatcccttgaacctggaggcagaggttgcagggagccaagatccgtgccactgcactccagcctgggcgagagcgaggctctgtctcaaaaataaaaaataaaaataataaattttgcctaaagcagatctgggcccacccccacccccatcacagggtccagcgagggcactatctctatggccgagggtgaagacctcagtcttatggaagaagacaaaggggacggctggacccgggtcaggcggaaagagggaggcgagggctacgtgcccacctcctacctccgagtcacgctcaattgaaccctgccagagacgggaagaggggggctgtcggctgctgcttctgggccacggggagccccaggacctatgcactttatttctgaccccgtggcttcggctgagacctgtgtaacctgctgccccctccacccccaacccagtcctacctgtcacaccggacggacccgctgtgccttctaccatcgttccaccattgatgtacatactcatgttttacatcttttctttctgccgctcggctccggccattttgttttatacaaaaatgggaaaaaaaaaaaagaaattatataaagttcctagagtcggtgtcttattagaggatttaaatactgggactggaagtatctaacaccacgtttcttacaggccacacagggaatgaggaaggggaggtgatcttgggcacaccttgggtcaaccctgcccctttctggaagttggcctatgtcattgtcagtgggtgtctgcttgtgactcaggtagggagaaggataccaagtttcttttttttttctttttgagacagtctcacccagttgcccaggctggagtgcagtggcgtacgtgatctcagctcactgcagactccatctcccgagttcaagcaattctgcctcagcctcccaagtagctgggattacaggcacacaccatcatgcccagctaatttttgtattttttgtagagacagggttttgccatgttggccaggctggtcttgaactcctgacctcaagtgatccatctgcctcggcctcctaaagtgctgggattatggcgtgagccaccgcacctggccaggacacccaagtttcatcccttctgaatgcactgcagcttctgagaatgggtagcacttattgaagacctactgtgtgccaggcattctccacctggggtctcattcctggccacaattcttagaaagtacacagcctcaacttttacattttttaaaagttttttatttttcagtttttgtagagatgaggtctcaccatgttgccctggctggtcttgaactcctggcctcaagccttccttccgcctcggcctcccaaagtgctgagattacaggcctgagctgctgtatggctatgattttgttaaaggccgacacagaggtgaagtcaactgctagaaatcacggcttttaagaggtggagtcacatttgaactctggcctctgatgccagatctgcaggtcacatgttcaccatggtccaggtgaccctgactgcggtccccacctcttctgtgaggcacagggcaggattccacctgaggcgcgaggagcctgggacgactcctttggtctcttctggggttcgcaaaaacctgggggtcccgggtgtgaagaagggtgtctgcgctctcagcggtcaggctccaggcgctgcgacaggacgccgaggacgcgctggaacttctcaaagcgttcagcgcgcggagctcccgcgccccggctaccccagagcagcctccgcacgaagccggtggtcagggcctccctcagctccgggttaggccggaatcctggaagcaaggtcaggtgggctgggggcggggcccaggcgcccgcctcgcccctcccaacctcccggcaccttcctttccccagaggactttgacccaacaggggcccgggagggacctgccccacctgcgggatgactaggcggggtcagaggggagggggcttccagctctctgcaggaatgggggtggggtgcctgaggggctctaccgcagtgcaatggggtggcctgttccaggtgccagatcctggaggtcccgccttaggggctgtgcctggacgtggggctgccccgaggacgggatcccaggttgtcggggaaggtggggggatcttgccgggtgggctgccctaggataggacggaggagtcgttttggagggagcagggcgttcttggggatcgagatccctgggggacgggatcgtcttaggtgggaagggggagtggggacccgcggaggtggctctgggggcaggacagcccgttttgaggtggacggccctgttcctatcaataccgctggatgcagcgtttgcttggggtgagaaccttcctggagtggagccgtcccagtttgggtggggctccgggaggcgtggcgagaggctcccctcctgggacaggctgggtttgggggatccggttagaacctgcagggtgctctgaagtctgcagtccagcgcagagggaacgctcacctcgcaggcgctgggctgccaccttgcggaatttgggtgcgtcccggaccatgtgacgcgccccgtgcagggtgcgcaacagccgctcacagctctcgtccagcggccccgcgacttcctcgccctccagtaggcgaaccatgggtgccacgtgcggcagcgccacctcgccggggtcgcagggtcctgcggagggggagggtctgatcagggtttggggctgtagatggggcatagggcagaggtggaacctaggacaaatgcaggggcggggcttaggactgagcgacagcggggtctgtggagaggggccaggaccacacgccccgtatggagggcggggcctatggcgaaggggcgtagcctagggaaaggggctgggaccaaggctggtgggggcgtggcctaggaacaagtctcgtgtggagggcggggcctagggaaagggccaggaccaaccctcatgtggagggcggggcctatggtgaagggaccgggcctagaacagatgcagggactgggcataggactagattgagtcctgttaaatttggtctgggcccccaggggatgctaagccccagaccttcacttaccagcgccctcatccagagcccgcatcagcggcttcagctcctgctcaaaggccagcgcagcctccgtgtggctccttcggagctggcgccacgtgtgctccaaccgggacacctgggagaagagatctgagcacgcctcctctccagtcttcccagtcacccgcactccagcttcctccagtccctgctccccacgaacctggggcatgagcagggcgcccatgactgcagccagcccgggcaggtcccccgccgcccctggccgcagcgccagcgccagctctaccagtcccctcagtgcggctgcgcgctcctccagcggccccgagcagcccagcaccgccagcgccccggccagcgccagtgtctgatgcctgcagaggtggagggcaagggtctgggggaagtggggaggtttgtaatgcaggggtgaggggggacaggaggtggcattgccccatctcccttcttccctggggaaccatgagtggggagctgtttggagatcttgggaagtggggggaattggcctcccccaaccaagattacaagctgctggctcacctctccagcagttccaacctcaagtggtgtccatggggaagagtgagcagctccaggccagatgagactcccatgttgccccgctgatctctggtcactcccaggaggcctgtggcctgcagaagggaatggggaagtcaggtgaagcgtgattatgtaggcatggttgggtcttgccctgggcctggggaggagcatcccaggaggtgacccacctggcagtctaccaatagcaggtgaagggcggtgctcccaggatggtgctccaggaacaggccacggagggtatgcaggacttggggttccaggggccgattctgggggcccagcaggcaggagggggcatcatgggggcagaaagagatctcagcctgtggtcttgtaaaacatctattctcttcctcctcatcctcctcggcctcccaccatggggcctctggctctgggcagctttggctcggggatgttccctggacactgggcactcggggcaccagctcgcagtacgtcgggggacgttcagaggcatcaggcagttcgaaggagggtgtccgggggggcttcgttggtgccttggcttgaagctgcccatcggaggccctgagactgtcggcaacagttcccaggggagcaggggccttcagcaacaccgggtcactgctcgttcggggcaaggcagatatgggcatggtggaggcttctagaggtcatacaagaggggtcaatgggaatacacagggaagattgctgaatgggcgggggtgagagcttcatcggctaccacccacctgatccatccactcattccaataatggggtataacaacctatccgggtgcagttttgaatttcaaccacctcgacggtagaaatgctacatgcttacacatggttagaaaactttagcatctctatagttctgtaaattatttttttttaattttattttattttatagagatgggatctcactgtgttgcccaggctggtctggaattcctagtctcaagcaatcctccctcctcggcctcccaaactgctgggatcacaggcatgagccaccttgcctgaccctatgaattctgaatactacattttaaatttgaattctttgtttttgcccctctgactgaaagatggtaagcagtgacccaacgaaattaaaaatttttttaaaaaaaggatgagcgtggtggccgacgcctgtaatctcagcattttgggaggccaaggtgagaggattgcttgaggctagggattccagaccagcctgggcaacataacaagatcttgtttctacaaaaagttagaaaattagctgggcatggtggcatgcacctgtggtcccagctacttgggaggcagaggtgggaggatcacttgagccagaggctgcagtgaggtatgactgcaccactgcactccagcttggatgacagagtaagaccctgtctcaaaaaaaaaaaaaagatatctatctatctacaattaagtgatatatctctctatatcatatctatagagatagatatatattatataaatatataatatatatttaaattaagtatatgttaaataaaattaacattattaaatgtataatgttgccctatatactacatataattacatttatatatgatagatattttactttttttgtgataatatatctctccatagacatatctatataaaatatatacaattaatatagatatctatagagagacaaagtataaaaaattcacaaagctgcgtatggtatgacactcagataagtgtcaaagaaaccaagcttattaaactttcttttcttttttttcttttttatttcttcttaaaaaaaaagatacatgtgcagaatgtgcaggttcagtatctgtgtgccatggtggtttgctgcacctactgacccctcctctaagttccctcccctcatcgtaaactttcaaatgacgtcctttgtaagttggtggcatgttgatctcctggactattagtacttaaaactgtactaagacttttgggagactgtatttaccatgcctttgaataggctcttttctaggaacttgaaatcatccaacagtgcctggctcactctgagttaaggtccaaagtgctcacagtagctgaaaaatcctcacaatctgagccccagggtctctctctctgactctcccctcattccctctgcttcagctacactcgtgtgtccctccttccctccctcccttcgttccttccttccttcctttcttttctttcttgacggagtctcactctgtcaccaggctacagtgcagtggcgccatctcggcttattgcaacctctgcctcccgggttcaagtgattctcctgcttcagcctcccgagtagctgggaccacaggcgccaccacacccagctaatttttgtatttttagtagacacggggtttcaccatgttggccaggatggtcttgatctcttgacctcgtgatccgcccgctttggcctcccaaagtgctgggattacaggcttgtaatttctggactattagtacttaaaactgtactaagacttttgggagactgtatttaccatgcctttgaataggctcaacctgcacattctgcacgtgtatctttttttttttttttttaagaagaaattgagccattgcacccagccctttcttttcttcttctttttttttttttttttaaatttgagtcagggtctcactctgtggcccaggctggagtgcaatggtgcgatcacggctcactgcagccttgactttctgggttcaaggagtcctcctgcttcaacctcccaagtggctaggaccacaggcgtgcaacaccacacccagctacccactcattttttggttgaatgaacagcttaaattcttgttctgacccaagagcctttgcactgcctcttcctcctgcctgcttatcccccagttatccacctgttccctccctcatttccttcaattttatttttttctgcaatggggcctttcctgactaccacttaaaattgcttgcttgggtacaatggctcacgcctgtaatcccagcactttgggaggttgaggtgggtggatcacctgaggtcaggagttcgagaccagcctgaccaacatggggaaaccccatctccactaaaaatacaaaattagcagggcgtggtgcacatgcctgtaatcccagctactcgggaggctgaggcaggagaatcacttgaacccaggaggtggaggttgcagtgagccggtatcacgccattgcactccatcctgggcaacaagagcaaaactctatctcaaaaataaataaataaatagaaataaaataaaattgcaatatacatctccatctttatagtctctatctcccttactctgttttttttgttttgttttgtttttgttttttcggtttttttgagacagtctcactctgtcccaagtagcttggattacaggcatatgccactacacctggctaatttttgtattttattttattttatttttttttagtagagatgggttttcaccatgttggccaggctggtctcgaactcctgacctcaagtgatccgcccaccttggcctcccaaagtgctaggattacagacctgagccacctcacccttcccttactgttttttgtttgtttgtttgttttttgagacagagtctcactctgttgtccaggctggagtgcagtggtgcaatcttggctcacggcaacctctgcctcccgggttcaagcaattctcgtgcctcagcctcccgagtctcccgagtagctgggattacaggtgtgtaccaccacgcccggctaatttttgtagttttagtagagacggggtttcgccatgttggccaggctggtctcgaactcctgactttaggtgatccgcccgccttggccttccaaagtgctgggattacaggcctgagccactgtgcctggccttcccttcctgtgttttaattttcatcttgaagcaaacaaaattgccttatttttgtggttcatggtttgttgtcctctcgtggactgttggctcccatcgggcagggatctttgtctctttctggtttgttgatgtatcctagcactccgtgcagggcctgggatgcagggacggctcatgttgaatggggttgggagaaggatgggaaaaaaggggcatgagggggcattcaggtgagtcctcctttaggtaagaccgtcagactcaactgctttgaggaacttaccctggatggagaggagccactcaggaaaaaattaggggaatgagaatgttcccgtcactggtggaaatgtaaaatgcaaaggccccgaggcgggaataaaagcctgagggttcgaacaactgcaaggagggctgtgtgaccagcatgaggagggtacgtagcagaagttgttagcaaggtaagctgtggtcagaacaggtacagctccttggaataattgtaaacacttttttttttttttgagatggagttttgttctgtcacccagtctggagtgcggtagcgccatctcggctcactgcaacctccacctcccaggttcaagcgattctcctgccgcagcctccagagtagctgggattacaggtgcgtgccaccacgctcggctaattttgtgtttttagtggagatggggtttcaccatgttggcaaggctggtctcgaattcctgacctcaagtgatccaccggcctcggcctcccaaagtgctgggattacaggcatgagccaccgcgctcagccttgtaaacacacattttaagcacccacaaagtccctgcatgttttaagtcatcgtgattgtcatcattttctaaagcaagaaattgaggctcgaagaggtgcctgcacctgaccaagatctcttaggtggtgagtggcagagccaatccctgagccacaggccattctagcagacacttacccatcccagcggggtcttctcttgaccgccccatatgtgccaaatctgcaggctgactgttgctccacttccttgccctgggggacagaagtgggagaaacctgtagtccccacctaagcagtgtcccccaccaatatctgcaaaaccctgtgtccagttactctgtaccagtgagtctcaaccaatcaaggtgacctacgtccaggggactcttagcaacgtgtggagacatctttagttgtcacaactagtagcatctagttggatggagctcaggaatgctgctcagcaccctatgatgcacaggacatctccacctcctcccccacaactaagaatgttcgggcctcaaaagtcaaccaaggccgggtgcggtggctcacacctgtaatcccagcactatgggaggctgaggcgggcggtcacgtgaggtcaaaagttcaagaccagccaggccaacatggtgaaaccctgtctctactaaaaatacaaaaaattagccaggcgtggtggctcatgcctgtaatcccagcactttgggaggccgaggcgggtggatcacttgaggtcaggagtttgagaccagcctggccaacatggtgaaaccccgtctctactaaaaatacaaaaaattagccaggcatggtggtgcacgcctgtaatcccagctactcgggaagctgagacaggagaattgcttgaacccgggaggcggaggttgcagtgggctgagatcgtgccattgcactccagcctgggcaacagagtgagacttcgactccagagaaaaataaaaaataaaaaagtaaaaaaattagctgggcgtggtggtgcactcctgtaatcccagctactctggaggctgaggcaggagaatcgcttgaacctgagaggtggaggttgcagtgagctgaaatcatgccactgcactccagcctgggcaacagagtgagactcagtcaaaaaaaaaaaaagtcaaccattgagttggaaaaccctgcgagtgttgggtgttctcaaggaggcagggagactgtgagtacctgagaggctctatccgagctgggccatccatcagggtgtcctcgctaaagctgcgtcgcagaggcccctgccaagtcacaggcctggagaccacagcccctgtggcctgggacagtgggcgcctgcctgtcatataactgtgaaccagagccggtatgctggggaattgctcatcctccagttgaaagagggctgtgggtcggcctggccggggacgcagggccacacggaacacctcaaaatggagggctgagccccgccagcggcaggagatcacggggttgcccccacgggacccagaggcgcgaaccaggaagtcgccattttgctgaagaagagcttcagccttctgtggatgaagttcagggggcaggggaattaggaatgagtccagggcagtggttaatggtagctccccccaccattgcccccaccacccaagaaaagctaccccagtgaaacttctgtggcaggcaaagacggggaactttcacaccaagttctgtccccctttctcctggcacctacgtagactacatttcccaggttcccttgcggctagggttgtcatgtgatgagaactggccaatgggatgtggggtagaagggctatgggaaatatccagacctggcgcataaaaccctgctgcacaatcttataggttgtgtcccctgtctgtcagctgatatcccccaaagcccagagggatgacagagctacaagatgcacttggctcccaactgatttatggagctttgcatctctgcttctcaaccaccttggactatgacattaacatgttgactgtgtttagctggtgatatcttgggaatgtttgttacagccactagctgatgctgaccaatgcaacatctaatttggtaaatgcactgtgcttgttatgcaaatgtggcttcaagagaagccattagctggatgcttccagattggggccccctcttttataaacatttgcaagcagtcttatgccagctgtggtggctggtgtcaaaatagggtaggaagggtggggcacagtggctcacacctgtaatcccagcactttgggaggctgaggtaggcagatcacttgagatcaggagtttgagaccagcctgggcaacatggcaaaaccctgtctctaccaaaaaatataaaaattagctgagcgtggtggtgtgcacctgtcattccagctactcaggaggctgaggtgggagaatcgcttgaacccaggaggcagaggttgcagtgagccgagatggagccattgcactccagcatgggtgacagagtgagatcatgtctcaaaaacaaaaaaaaaacaaaaaaaaaaacaaaaaaaaggcttggggaggcaggtagaagggccaggaccccagagagaggcaaagtagagctgaacatggggtctggggactaaataatagatgtagcagacacacgtgtgtagcccttactatatgtcaagcactgctttaaatgtaaagggtgttaactcttgtaattcctgtaacaagggtggtaggtattattatacctttttttgttgttgttctttgggacggagtttcactcttgttgctcaggctggagtgcaatggcacaatctcggctcactgcaacctctgcctcctgggttcaagcgattctgctgtctcagcctcccgagtagctgggattacaggtgcatgccaccatgcctggctacttttttgtatttttagtagagagggggtttcatcatataggtcaggctggtctcgaactcctgacttcaggtgatctacccacctcggcctcccaaagtgctaggattacaggcatgagtcaccatgcccggcccatttttttcttccggccttttttttttttttttttttttgagtcaaggtctctctcgattgcccaggctgagtgcagtggagcactcatggctcactcacagccttgacctcctgggcttaagcaatcctcccatctcagcctcctgagtagttgggacaacaggtacatgccacccatgcctggataattttcgcttttttttttttttttgtgtagagacagagttctgctatgttgcccagactggtttggaactcctgacctcaagtgatcctcctgcctcagcctcccaaagtgctgggattacaggcatgagccaacatgcctggcctgctatccctatgttaaagatcgggagactgaggcccagagaggtcaaatgtcctgcccaaggtcacatacaatataaattgtagggtttggatttgaacctagggtgtctgggtctcaattatgggattttaactattaagttctactgcctctcatgatttcatgagatgctcagggtcccagaatttttgggggtgacaactgagtttcagatggaggtgggagcctcagatttatttgtttgtttatttatttatgtttttgacagagtctcgctctgttacccagtctggagtgcagtggcacaattgtggctcactacaacctctgcctcctgggttcaagagattctcctgcctcagcctcccaagtagctgagactacaggcgcataccaccatgtctggctaatttttgtatttttattagagatggggtttcacaatgttggccaggctggtcttgaactcctgacttcaagtgatccgcccacctcggcctttcaaactgttgggattacaggcgtgagccaccatgcctggcttgggagcctcacatttagagggaaataccaggaggtagatggagttcagagggagagacggccagagccaagagtagtttgggggcattaggactctccttaagctccatcaccaatctcatcatcccaaagaaagtgataatttaaatatagtgacagtccccagccagccaaccttcaagacagtccccagccctctgccacctgtcccaatagaccttggcactaagtccctcatccagggacccaggaatcctcagcaagggtgggagaggctccccaccagatggtgctgaggtcctgctgtgggtggtacctggcgggacaggaggccgtggtaccaaggttggccagcaaggtcttctccatcctgtggcacctgcatggagctcttgggaacagagggtgccagggctgagctctgcactttcaacaggcctcagtcttccacatctgtaaaaggggaataattagccctgcttgagtgtctgggtcagctcctttcatcctcttcttaattttggagacagctccatcaaatctttttttttttttttttttttttttgagacagagtctcattctatcacccaggctggagtgcaatggtgcgatcttggctcactgcaacctctgcctcccagattcaagcgattctcctgcctcagcctcccaagtagctgggattacaggcatgcaccaccacacccagctaatgttttttctttttttatatttgtagtagagacagggtttcactgtgttcgccaggctggtcttgaactcctgacctcaggtgatccacctgcctcagcctcccaaagtgctgggattacaggcataagccactgcacgcagacttttttttttacatttaaagagagaggtcttatgtgttgcccaggctggagtgcagtgctattcacaggtgtgatcatagcacactttagccttgaattcctgggctcaaggaatcctctagcctcagcctcccaagtagttgggattacagatgtcaccatcgtgcctgttccaaatataatgcaatcgaagaaaaaaaaaatggctgaagatgacaacatgccaccccatcttgcagaaatgtaattaatgaattcactgaacccctatttattcagcaccttatggggtcccaggctctgttctaggccctagagacatagcattgaacaaaacagatggaaatctctgtccttgggagctgacattctactggggagcagcacctcagaaaagaactagatgatggcatacatgagtgagtgctagacaaaaaaactaaaccatggatgggatataatgaaagtacaggtgctagggtgaacactcttttttttttgagacagagtcttgctttattgcccaggctggactgcagtggtgcaatcacagctcattgcggccttgacctcctgggctcaagtgattctcccacctcatccttctgagtagctgggactatgagcgtgggccactgtacctggctaatttttttttttttttttttttttgagatcaagtctcactctgttgcccaggctggagtgcagtggcatgatctcagttcattgcaacttccgcctgctggtttcaagcaattctcgtgcatcggcctcctcagtagctgggactacaggtgtgtgccaccatgcctggctaatttttaaaatatttttaatagagatggggtttctccatgttggccaggctggtctcgaactcctgacctcaggtgatccaccctcctcagcctcccaaagcactgggattaccagcatgagccactgcgtctggctgtgcctggctaatttttaaatatatatgtagagattgggtcttgccacgttgcccaggctgggtgaacatttttgatcatgtgaccaggaaaggtctcattgagtaaagtctggaaggaattctggggagtgtgccaggtgactctgggtgaaaaaacatcccagtcagggggaatttaacttacaaacatccatggcttctcggcaacctatgcgcacactcagaggttctcaggataggtgcagatctaacccctattctttgctttagaatgcaacgctgggggccaggcgcggtggctcactcttgtaatcctagcactttgggaggcagaggtgggtggatcatctgaggtcaggagtttgagaccagcctggtcaacacagtgaaaccccgtctctactaaaaatacaaaaattagccaggcatggtggcgtgtgcctgtagtcccagctactcaggaggctgaggagagagaatcgcttgaatccaggaggcagaccctgcagtgaaccgagatcacaccactgcactccagcctgggtgacagagcaagactccgtctcaaaaaaaaaaaaaaaaaaaagaatgtaaccccagggttaagatttttaaaaggtcacattttgtagcaatgtcagcaaacagcaatgttgcctttgcagatccttctatttcggagcccatacatgtggttatcatgatgattgaatttggatctcagacattttggtagtttcccgataatctcacaggcctcagggccagtgtgtctcaggtgtctggtgggggagatttctctggatggtccagaagaagataatctgcttcttactctcctgcaagctctccctgcagccctgcaaagtcttctggtggggtctgcagagaaattcctgcctcctgagtcagcaggaagttcccagaccagccctaggtggctttaggggaggagcgctgggcagggagccagctgccagtgccgcatacctgaagccaggtgtgtctttgcaatgcctgcgcacttcctgtttgtcacctggaccagggctagcctcggtcgcagagtttcccaaccccaagttcctgtcttgtgtctcccttagtgagagtgaagttgagtcaatggcaaggttctggttagtttgaggacacagggtggccataggtcagccaaaggccaactaagccatctcctgcctctgagtcctttgggatcatttattcgggcacggaagagaagaaacgggcagaatcaggaatcagaccaagcatagagagaggagagaggggattattcatgttccagttggatcataaacatgtgtccacgtgtggggaggacgtggagggtgggaaccaccagcacaggcaacacaaacacagatgtaggcaggactcgcttttgacgttggacgaccattgctggagcacttgctgtgcaccaggctctgttctaggacctagagatacagtgactaaggagattaaagctcggcaccaccctgccctccagagcttgcagtcggctgcgcaagacagactgcaaacgagcacaagatgaatggagaagacagaccatttctaagagttatcaatgaaagtgataagccagggagatgtgatagaggaggctggacaggacagcctctcctataaagtgacattggaactgagacctcagtacagaaggaggcagttaggcaaagatttggaggagtcgcctgggtgaggggtacagtaagggtaaaggcctggagctgagatggacttgctttttacattttacatcatcaaggcggctggtgtagccggaatacgatgaggaaggagtagataggagggcaatgaggttggagagatcaggaggagagactaggcaaaaactagtggactttgaattttaatctctatgacccaagggttttaagtgaaggaggggcccgatctgattcgccgtttaagaggatcactcaggcaaaaatggaaacaatggctttctgtgctgcacaggaaatacacttagagaggcacgcccaggtgagcccgagcacaccgacacgcgtaacgcacagcgaccctctcattcgcgaggcgacctcttctaccccagatcctccctgcgagccggtgaccccacctggaaagagaggactccccatcccaataatcctggttctggatctgccctggggctccactcacctgggcaggacccgcggggctcccacgaggctgggtccaggcggaagctgaggctccgcggctccgggctgctgtcacccccgccctccaccttgccaccgccccagccttcccagaccacacctagtgggaactcagcccagttacctgaccacacctcctgcagaccccgccccctgcgggccccgcctcaaactaacttcccaggcccttgctccgcccccttaaaaccattttttttgctactagccacgcctccttctgcatcgcaccgctttctccatagaccccgcccactaggggagcaccacgcatcctttcctgccagtggcccctccccttgtatatagccacgaccaccgccgaatgactacgcccacccgcagccacctccttctcagccccgccccttagggcaatagaagaaatttcatcccaacgttcccgccccttagaaccctgcccctcccttccacccaggcggccccaagcacccatggccctttgggaccagggcggggtggagtggggtgcctctctcccctccccgccaaggctccgggtcagggcagggcaactccctcgggctcttacgccaggctggggtagctgcggcagctgtgacgtaaggaggggtacgcttcctccagaccgccctcccggattttccggaaagaagccccatttaggtggcgggttttgtggagagacgtccgggaaaacgcgacagcttccttcagtgacagcacgctggagcggggcgggactttggtggaggtggaaggcaaatcattcaggtggtttcccaggtgggaagaagggtgggggggacttccatcgtgatgcctggagacgaacaagagaaaaggtgacagggacctagtgcaagagagaggactctttggccacgtttattgatgagttcctcatattaacatcagtcttgtcttgtagagacagggtcttgctatattgcccaggccggagtgcagtggtgatcatagctcactgtagcctcaacctcctgggcttaagctatcctcccgcttcagccttccaagcagctgagactaaaggtgcacaccaccacacccagctgattttattttattttttgtagatgtggcgtcttactatgctgcccaggctctggaactcctgggctcatgcgaacttcctgccttggcctcccagagcgctgagattacaagcaagcatgaaccactgtgcttggccccagtaaccacagtcttaaaagcagtagcagcagctaacatttattgagcacttactgtacacaagggctgttctgtcaacttgcctttattttattttattttattttttgagatggagtttcactctcgttgcccagactggagtgcagtggcagcagtctcagctcactgcaacctccacctccccggttcaagcgattctccggctgtagactcccgagtagctgggattacaggctaatttttgtatttttagtagagatggggtctcggccagactggtctcaaactcctgacctcatgtgatccacctgcctcggcctcccaaagtgctggggttacaggcatgaggcctctattttaattttcaaacagaccaccctgtaagggtggtaggtagtattttcatcacttccattttccagatggagaaactgaggcacagggcaactaaaccatttgcccaagttaacctggcttgtaagtggtagaggcgaaattcaaacccggagctctggagctttatcctgtctgcctccttttcaatcttcgcatgcccactttctccacgatgctgctttgcggtgaaagttactcacccaccattttacagatgaggaaattgaggcctagagggccaacgatgcttggggatgaaaagttttgatgcctgtaggttgcaaagcagggaatttccagactgggctcccccgactggccctggcaaatatggaagagactccaggctcaagaggggaagaaagtttcttccttatccctcaccggtctggtattggtacagtcagagggtaggggcatgttcagggaaggggtctagcgcctcctcgtggttataataatttaaaaagagggcccagcactttgggaggccgaggtgggcagatcacctgaggtcaggagttccagaccagcctgaccaacatggtgaaaccctgtctccactaaatacaaaattagctgggtgtggtggaatgcacctgtaatcccagctactggggaggctgaggaaggagaatcacttgaacctgggaggcggaggttgctgtgagcagattagctgtgtgtggtggcatgcacctgtaatcccggctactagggaggctgaggaaggagaatcacttgaacctgggaggcagaggttgctgtgggcagagattgcaccattgcactctagcctgggcaaccagagtgaaactttctcctaagaataataataacgataatttaaaaagaaactccatgatgagggccacgtattaggtggacgggggagggcctgcttacactctactggggtggaagctagggatgggggcagagagacctaatctcatgaagatgatttcagctaatgataaggtaatggccgggaagccagtaaatgtttgttgaatgagttaatgaaagacactattgggcctggcacagtggctcgtgcctgtaatcccagcactttgggaggctgaggcaggtggatcacttgaggccaggagtttgagaccagcctgggccacatggcgaaaccctgtctctactgaaaatacaaaaatttagccacgcatggtgacacctataatcccagctactcgggaggctgaggcaggagaatcacttgaatctgggaggcagaggttgcaatgagccgagattgcgccactacactccagcctggtccatagagcaagacaaaaaaaaaaaaaaaaaaagacactattgtagtctataaggagagggatgatggtggcttggatttgggtggtgaccatggacatggtgataaagggatggatttgggataaatgtcaggtgcagtcaatagagctttcaattatttattcattcaacaggtatttaaggggcatgcctatgtgtcaggtgctgcataagagaggggtcagtagtgaaccaaagaaacataaattcttgaacagacaataaagaaacaatgatgagcgggtgccatggcccacgtctgtaatcccagtactttgggaagccgaggtgggaggattgcttgaggccaggagttcaagaccagcctgggcaacatagtaaaagcccctctctgcaaaaaaatttaaaattagccaggcacagtggcacaagcctgtagttccagctacttgggaggctgaggcgggaggatcacttgagcccaggagtttgaggctgcagtgagctatgatcatgccactgaactccagcctggatgacagaagaaagagcctgggcacagtgactcaagcctgtaatcccagcactttggaagaccaaggcgggcagatcacttgaggtcaggagtttgagaccagcctggccaacatgctgaaaccctgtctctgtgaaaatacaaaaattacctgggcatggtggcaggtgccagtaatcccagctgcctgggaggctgaggtcagggaaaacctgggaggcagagcttgcagtgagctgagatcatgccactgcactccagcctgggtgacagaatgagaccctgtcaaaaaaaaaaaaaaaaaaaaaaaaaaaaagccgggcgcggtggctcacgcctgtaatcccagcactttgggaggctgaggcaggtggatcacctgaggtcaggagttcgagaccagcctgaccaacatggagaaaccctgtctctactaaaaatacaaaattagctgggcgtggtgatgcatgcccgtaatctcagctacttgggaagctgagacaggagaatcgcttgaacccaggaggcagaggttgtggtgagctgatcacaccactgcactctagcctgggcaacgagagtgaaactccgtctcaaaagaaaaaaaaagaagaaagaagcctggcgcggtggctcacgcctgtaatcccagcactttgggaggctgaggcgggcggatcatgagatcgggagatcgagaccacgatgaaaccctgtctctactaaaaatacaaaaaattagccagacgcggtggcggacgcctgtagtcccagctactcaggaggctgaggcaggagaatggcgtgaacccgggaagcggagcttgcagtgaactgagattgcgccaccgcactccagcctgggtgacagagtgagactccgtctcaaaaaaaaaaaaagaagaaagaaacaaagagagaaagaaaggaaagaaagaaaggaaggaaggaaggaaggaaggaaggaaggaagaaaggaagggagggaaagagggagagaaaggaaggaaggaaaaaaataacttaaaaaatcagatttgttggacaaagatcagggcttaacctagggaggtgggtagagctaatggaatgcggaaaaggctgtgatttgaaatgaggggatttaggaagacctcatgagaaggtagcatttgagcaaagacatgtaggggtgagggagctagccatgaagttgcttaaggtggaggacacagcccgtgcaaaggccctggggcagggccgtatgttcctggcatgttggaggaagagcgaagaggcccgtgtggctggagcacagtgaagagggggagagagggagtggggagggcagggagggaactgggcaattcaagcagggttttgtgggccttggggaggacttgggcttgtccctggaggaaagtgggagccatagagagttgtgggcagaagaagggtgtgccctgactcagatgctcacaggcaacctctggtggtggctgcagggaggacagactgtggggtacgggggctggagtcagaagaccagctgagtgatgacggggctggaccagacagaggagggggtgagaagtgggtgaattctgggtatatttcagagtgtcactgccgccgtctgcatatggaggaagctcacccatctcatagtctagctggcctgactcccccagccccccaactccccatgcccaggcctgtgtcgagtgggcggaagaaagagatgtcagattctgcatggaaggcgtggggtggggctgggctgcaggtgctcccccagctcccccccgccccatggctcctcctcctccaccccctctcagggcgacagttacaggcaaagaagaggaagtggtagcactagctgtcgctccacaggcgagcagggcaggcgtgcgggcgggtgggtggtggaggctgcgagggtgcacggccggccctgggcaggcggtagccatggagctgtggcgccaatgcacccactggctcatccagtgccgggtgctgccgcccagccaccgcgtgacctgggatggggctcaggtgtgtgaactggcccaggccctccgggatggtgtccttctgtgtcagctgcttaacaacctgctaccccatgccatcaacctgcgtgaggtcaacctgcgcccccagatgtcccaggtgagccctccgcgggcaggtgtgctgagggttggagacgggggtcctccccggggctgacagtcgaggggctgacgtgctgctccacctctgggcctgcaaaggagagggaatatgcttacaggtccagggctggcccagggggtggtcacaatctgagattctggggtggcctccccaagcttaacaggctccctgtgtgggttcacgggccctgagttggcccgcatctgggctgagaactggcaaactaggggttaactctctcaagccccaggcgcctctactgtggttcatgcccccagatgggaccaaccagaggtctcgggggagctccccagaacccccagggtggccattgggttacctgaggctttggactcctttgacccccagagtctggatgtgggggaggagcctccgccaacatcttcccccacatgtgtctcctcctcccgggccctgggccccttccttccccttacatcttccttccccttggcttcctgcctgggcctggggcagcatggggcaggtggggggctgcagccccagggatctgagcttcctccctgcatccatctcagaggagatagtaaggcagggcccagtcctgggctcagagagtgggtcctgaggtcttggtgcttggaagagctgcattttctcggcagggatttctgcaggggcccaggctggaggggtggtggtggatttgactgtggctgtatgagactggctcaggaaatatattcaaatccctatttgaatgtggttgggtgggcgtgtgatgtggctgcattatgttgctgtagcatcatgtctggttccccagggctgctgggtgggaacgggggacggggcggggctggtggagtcccatctcctctgggatgaaaggagatacagccctatcctggggcctgggggacacagtcctgccctgaggtctgaggggacagctcccatctggtcctcaggctggccctgcagatgaagagctgggaggataagttaatggagatgggcccatgggggttcctggcgggtggttttcaggggcagggccattggtggaagagatccatgcgcctttactccttctgtttattttatttatttatttatttttttgagacggagtctcactctgtcacgcaggctggagtgcaatggcaccatctcggctcattgcaagctccgcctcccaggttcacgtcattctcctgcctcagcctcccgagtagctgggactacaggcgcccgccaccacgcctggctaattttttgtatttttagtagagacaggggtttcaccgtgttagccaggatggtctcgatctcccgacctcatgatccgcccacctcggcctcccaaagtgctgggattacaggtgtgagccaccgcgcccagcctttttttttttttttttttttttttaaagacagggtctcactctgtcgcccaggctggaggcagtggtgcgatctcagctcactgcaaccttagcctctcaggatcaagcaattctcctgcctcagcctcctgagtagctgggattacaggcgcccaccaccacacctggctaatttttgtatttttagtagagacagggtttcactatgttggccaggctagtcttgaactcctgacctcaaatgatccacccacctcggccttccaaagtgctggaattacaggtgtgagccactgtgcccggctgctccttctgtttttttttatcttatcttttattttttgagatggagtcttgctctgttgcccaggctggaatgcggtggtgcaatcttggctcactgcaccctccacttcctgggttcaagtggttctcctgtcccagcctcccaagtagctgcgactacaggcacacatcaccatgcctgcctaattttttttttttttttgtatttttagtagagatggggttttcccatgttgaccaagctggccttgaactcctgacctcaggtgatctgaccacctcggcctctcgaaaggctgggattacaggcatgagccaccatgcccggcccttctgtttctttagtgccaggggattacactgtcctcagctgggacagggcttcctgaaaggagaaggcactccccccaccaacctaagcatccatcctctggccacagcccatcccagctttgcctacatttgcttaatcttctggtttctagggcatgaggaagtagtcatgggatctgttaggccccatctgttagacctggcagggagtcaagctctctgtgatgcttcaatagcagctaatgggaaagtggatagacttaaggatgaacttccattcttgtgtatgtcttagctaaagctagtttttggatgaaggacgagggtgcatgatgctaatccctgggagagcagctgcactccaaatacagtcctaatcctctgtaacagggaacaacgggaacccagatggggtcaggctttatgcaagaggggacatttgtgctggggttttgaagagtaaataggagtttttctcattgttctggcttcctgtgcccagctgtatcaggctccaggctgggcatcggtgtacccagaccctttccctcttcgagggggcacattcctgcccctacccattttgttgccctttgaagcccggccgtgtgtctggtatgtagtggggacgtgtgagggaaggtaagaggtcttgacaagaagccagaggaagctgccacaggaacaacctctctgggtttctgggtgcctaactgtccacagattgaagcagagctgtgaatgccccatgggatgtgaaagggtagagggaaaaaggaaaggtgctcctgtggaggaaatggcataaataaaggtgtgcaggctggaatgagaattcttcccagtttctgtcatttctcttcggagtccttctcttttttctcagttgtttcttgggaagagggtggaaagaacatattcatccatccgttcatccacccatccactcattcatccactcatctatccctccaattatccatccatctacccatccatccatccatttatccatccatccatccatccatccatccatccatccatccatccatctgctcatccattcatccatctgctcatctatccacccatccatccatccatccatccatccatccatccactcctccatccatctgctcatccatttatccatccactcatctatccatccatccatccatccatctgctcatccattcatctatccactcatccatccatccatccatccatccatccatccatccatctgctcatccattcatccatccactcatctatccatccatccatccatccatccatccatctacccatccacccacccatctatccatccatccatccatccatccatccatccatccatccacccacccatccacccacccatccatccatccattcatccattcatccatccactcatctatccatccatcctctcatccatccatccatccatccatccatccatccattcaaccacccactcattcacccactcatccgtccatccactcatccatccatccatccatccatccactcatttatccatctatcagtctatccatccatctacttttccatccatgtatccacccatccacccacccacccattcacctatccacccacccatctatccatggatccatccatccactaatctgtcttttttatttatttgtttatttatttacggcgtctcactctgtcacccaggctggagtgcaggggcatgatctcggctcactgcaacgtctgcttcctaggttcaagcaattctcctgcctcagcctcctgagtagctgggactacaggcacccgccaccacgcccggctaattttatatttttagtagagatggggtttcaccatattggccaggctggtcttgaactcctgaccttgtgatccactcgcctcagccttccaaagtgctgggattacaggtgtgagccatacgcccggcccatccattcatctatctatcatccacctgcccacccacccatccatccatctactcatccatccatccatccatccatccacccatcccatccatccatccactcatccacccgtctactcatctatccattcatctacccatccatccattcattcatccatccatttatctgtttaactatccatccatccatccatccatccatccatccatccatccatccatccatccagcaatgacaaggtctgccaggccctgttcttggtgctggggacagtgggaatagcacacacacacaaaaacccctgttgttgaggagcctgcattctagtgggggaggctgacagtgaagaaataagacaatgtataagtcatcaggaggtggtatgtactgctctggagaaaacaaagtggaacagggtatgaggggggcactttgacgaggagggctagtggtaaggtgacattgcagcagagacctggggaaaattaaggaatgaatcatgtggatctggggaaatggtgttccagacagtggttactgccagtgcaaaggccctgaggtaggagccagtcagtgcctgtatgttcagggcagtgactggcccagctggtgggaatggtgcaggaggtcaggttggatgaatctccaagcggctggtccccttgagatctgaggcccagggagagaatgataccatcatgagaagccacagctatactgagacacccaactctcaattatgaattttgttttttttaaatgagacagagccttgctgtctcccaggatggagtgcagtggcatggtcccaactcactgcagcctccacctcccaggttcaagcaattctcctgcagcagcctcctgagtatctgggattacaggcgcctgccaccacgcctggctaatttctgttgcccaggctggagtacagtggcatgatcttggctcactgcaacctcctcctcccgggttcaagcgattctcctgtctcagcctcctgagtagctggggctacagatgcgtgccaccatgcctggctaatttctgtatttttagtagagacagggtttcagcatgttggccaggctggtctcgaactcctgaccttaagtgacccacatgcctcggcctcccaaagtgttaggattgcaggcgttaagccaccacgcccagacaccactgtgctcttgaagtccaaaatctgggctgcggagatggaacttgaaggccaagagactggagaggaaagaacagatggttggaaagatccaccaggacatgggagctggttagacctaggatgtgggcagctgctggggccaagatgatgttaagttccccagccccagtgaatagtggggagagggtgggacagttagagtagggggtggactggggagtgggttgggtggtggctttggagagccacacctgggttcaaattctggtaccaccacttcctggtttcacctctctgagcttcagtttctccatctgtgaaacatagataaaaatggcaccttttaaggctgggcggtggctcacgcctgtggtcccagctacccgagaggctaagtggggaggatcacttaagcctgggctgcagtgagctgtgatggcaccactgcattccagcctgggcaacagagagagactttgtctcaaaaaacaaaacaaaacaaaacaaaacccaattttgcctgggtgtggtggctcgtgcctgtaatcccagcactttgggaggctgaggtgggagaattgcttgagttcaggaattcaaagcctggtaacatagtgagaccccgtctctactttttttttttttttcttaagagacagagttttgctctgtcagccaggctggagtgcagtggtatgatcacagctcactgcagcctcgaactcctgtactcaagcagtcctcctgcctcagcctcccgagtagctgggactacaggtgtgcaccggcatacctgggtgatttttttgtttgtctgtctgttttctgagacagggtctcaatctgtcacccaagctggagtatagtggtatgatcacagctcactgcagcctcgaactcctgtgctcaagcagtcctcctgcctcagcctcctgagtagctgggactacaggtgtgcaccagcaatacctggctaattttttattttttgtagagatggggttttgctatgatgcccaggctggtcttgaactcctggcctcaagcaattcctcccgccttggctttccaaagtgctgggattacaggcatgagccactgcacccggccagaatagaggttcttatctccatcctcccataacaggaaagatgacacatgccacccactgctctatgcttgctttcctcactaatcaccttggcagtctttccaagtcagtctgtagagattataattattctttataacatgactgcgtattccatttatttcaagaaagacttacattttgctcgccctgtgctagacattagtctaaaccagggaggggcctggctggatgcagtggttcaggcctgtaatcccagcactttgggaggccgaggcgggaggattgcttgggtacaggagttagaggccagcctgggcaacagagtgtgacctcgtctctataaaaatgaaaaataaaactaaaataaagctgggggctgggtgcggtggctcatgcctataatcctagcactttggcttacaggtgtgagccaccgtgcctggcccaattatagcttctaaaaaataataaaaggccgggcacggtgactcacacctgtaattccagcactttgggaggccgaggcgggcggatcacaaggtcaggagatcgagaccatcctggctaacacggtgaaaccccgtctctactaaaaatacaaaaaattagccgggcgtggttgcgggcgcctgtagtcccagctactcgggaggctgaagcaggagaatggcatgaacctgggaggcggagcttgcagtgagccgagatcaggccactgcactccagcctgggcgacagagcaagactctgtcttaaaataataataataataataataataataataataataataataataacctcatccatgaatcattttccagctcctctgctgtgtgatcttgggcacattagtaaacctctctgtttcctggtttctcatctgtaaaatgaggatgctaaatccctatttacagcatcattgtgggggataagtgtattattataaagaacctagaaaagtgtttagctgcatatgcagttgtgtgttgcttaataaaaggaatctgttctgagaaatgcgtagttagatgatttcacagttgtgtgaacatcagagtacatttacataaacctagagggtacagcatactgcacacctgggctatatggtataacctattgctcctagctacaaacccgtacagcatgggactgcactgaatacttaccattgcattaaaagattgccttctccttttctttcttttttcttttttttttttttttgggacggagtctcactctattcctcaggctggagtgcaatgacgtgatctcagctcactggaacctccacctcctgggttcaagagattctcctgcctcagcctcccgagtagctgggattacaggcacgtgccaccacatccggctaatttttttgtatttttagtagagacagggtttcaccatgttgaccaggctggtcttgaactcctgacctcagatgatctgcccgcctcagcctcccaaagtgctgggattacacgtgatagccaccatgcccaggcgatttcttatcatttataccatattttatacaaagatttcttatctttcttttgagacagagtctcactctgtcacccaggctggagtgcattggcacgatctctgctcactgcaacctccacttcttgggttcaagtgatcctcctgcctcagcctcctgagcagctgggactacagatgcacaccaccaagcccaccattttttaaagtagagatgggggtctcaccatgttgcccaggctggtctcaaactcctggcctcaagagaccctcccacctcggcctcccaaagtgctgggatgataatcgtgaatcatcgtgctccacccagtcctcgtgtttttatttttcaaattttaagacgttttattttgtcaaccgaagtgctagccaatctttgtgtttttgatagatattgccaaattgttatccgtctgggattgtttccatatgaattatttcaattataccaccacatgccagaggactggcttctctgccgcctccccgacagacggttctgttgccaagattctggagttttgccagctggatgggaaatcagtggagctcattaaggctcagtttacattttctcttattctgagtgaagctgagcctctttccttatgtttaagagctatttatattttcttcctgtgatacaatctctgttcatatcacttgcttactattgttgcactttctagaactactgaccttttctcttactgattttttttttttttttgaggctgagtctttctctgttgtacaggctgcagtgtagtggcgcaatctcagctcactgcaacctccgcctcccaggttcaagtgattctcgtgcctcagcctcacaagtagctgagattacaggtgtgcgccaagatgcccagctaatttttgtatttttagtagagacagggtttcgccatgttggcctggccggtctcaaactcctgacctcgagtgatccacccgtcttggcctcccaaagtgctgggattacaggcatctcttactgatttttaggagctctttatatataggttgacttaaattgcaagtcaggtatttgctagctttgtggtcttggagaaaaaaataattacttaacctattggatccctgattgtcttatctataaaacaggaaatctataaaatgagaatgttggccgtgcacatggctcactcttgtaatcccagcacttcgggaggctgaggtgggggatcacctgaggtcaggagttcaagaccagcctgtccaacatggcgaaagcccaactctactacaaatacaataattagccgggtgtgctggtgggcacctgtaatcccagctactcaggagactgaggcagaagaatcccttgaacccaggaggcggaggttgtagtgagccaagattgcaccactgcactccagcctaggcaacagagtgagactccatctaaaataaataaataaataaataaataaaaataaaaataaaataaaataaaatggaaatgttgacagtacctttatttcagagttgtgtaaggattaaacatgataaggtaaatgaaattcccagcatggcaattaacatatagtgagtgctaaatgaacgagagtcattatttttgttaatttaattccattgagtcccagctgcctgtaggcaatggtatataagtcagggtacgtatgttaactgctgtaacaaattgcatcattttgccaggcacaatggctcacgcctataatcccaacactttgggaagccaaggcaaggctaatcgcttgaggccaggagtttgagactagcttgggcaacatacaagatccccatctctacaaaatatatatatatattagcagagcatggtggtgtgtgcctatggtcccggctacctaggacgctgaggcaggaggatcacttgagcccaggaattggaggctgcagtgagctatagatcgcgccgctgcagtccagcccgggtgacagagtgagatcctgtctcggaagaaaaaaaaaaaaggccaggtgcagtggctcacgcctgtaatcccagcaccttgggaggccaaggcaggtggatcatgaggtcaggagtttgaaaccagcctgaccaatatggggaaatccggtttctactaaaaatacataaattagccaggcgtggtggtgtatgcctgtagtcccagctactcaggaggctgaggcaggagaatggcttgaacctgggaggtggaggctacagtgagctgagatcatgccactgcactccagcctggtgacagagcgagactccgtctcaaaaaaaacaaaaacaaaaacaaacaaaaccaaaccctcaaaacacaaaaccaaattacatgacttcagtgatagtgagactttacttcttattgatgtcacaattcagtttgggtcaatgtcaggggttgggggaggagggctctatgttatagagtctctctagggccgaggctccatcatctcatggtcttagcttcccgaaggcccttggagtcttttctactggggaaagagcgctatgaaagaatttcccaggccaggcctggaagtggcgccatcacctccatcctttttttttttttttttttttgagacggagttttgcccttttcctccaggctggagtgcaatggcgcgatctctgttcagtgcatcacggcaacctccgcctcccaggttcaagtgattctcctgcctcagcctcccaagtagctgggattacaggcatgcaccatcacacctggctaattttgtaggggtttctccatgttagtcagggtggtctcgaactcctgacctcgggtgatccactcgcctcggcctcccaaagtgctgggattacaggcgtgagccaccatgccctgcctccattcttgttattggccagaacttggtcacatggctccatttaactacgagggagactaggaatgtggttaaactggagctggggataaaaaggagataggttggttggacgcaaagaagtcactgccgtagaacctcagggtaatgcctcactggctccagaaatgcaggtatggagcgggtttcaggaatgcaggtctagggccaggcatggtggctcatgcctgtaatctcagcactttgagaggccgagacaggaggattgcttgaggctaggaattcgagaccagcctgggcaacataccaaggtcccgtctctacaaaaaataaaaaaataagcccggcatggtggtgcacgcctatagtctcagctactcaggaagttgaggcaggaggatcgcttgagcccaggagtttgatgctgcagtgagctatgattgtgctaccactgtactccagactggacaaaagagtaagaccctgtctctaaatatatctatgcaggtctgtggaaatctcaatgggatgtagaataagaaggacctgagccaaggccatgggggaggaattcagctggggatgagggagctgggtgatagcaacttcagcaaaatgggttgggctgattggaaaacctcctcttaccttgcctgctagggccaacaggaggggcatctaggagggtcagcacttggcaccatccctttccattccattctgttccttttttttttttttttttgagacagagtttcactctctctcccaggctggagtgcagtggcacaatcttggctcacggcagcctccgcctcccgggttcaagcgattctcctgcctcagcctcctgagtagctgggattacaggcaagtgccaccacacctagctgatttttgtatttttagtagagacggggtttcaccatgttggccaagctggtctccaactcctggcctcaagtgatctacccgcctcggcctcccaaagtgctgggattacagacgtgagccaccatgcccagcctccattctattctattcactgacctcctctcttggtccagtgctgggaaatgtcacctttcaggactttcacagagatgctagaaatctctgtcccttccctactcacagcccttccctggttccccactgcccttggtgaaaaagacaaaatcctcactgtagcccacaagggcttatgcatttggcctctgtccatctctcagcccttccctgctccctctctacccattgctctctgcaccgcagccaaatcggccacccagcacaatccagcctcagggcctttgcactggctcttccttcttcagggatttctcttccctcaggtatacacggtgagtgttctcttatctccttcaggtttctctttctctctctctctgtcttttttcggagaagggggtcttgctctattgcccaggctggagtgcagtggtgttatcatagctcactgcagcctccaacttctgggctcaagtgatcctctcgcctctgcctcccaaagtgctcggatacagacatgagccacttcacctttttcttttttctttgttttaacggggtctctgtctattgtccaggctggagtgcagtgacatgatctcagctcactgcaacctctgcctcttggattcaagtgattctcctgcctcagcctcccaagtagctgggattacaggcatgtgccaccatgcctggctaatttctgtatttttagtagagacggagtttcaccatgttggccaggctggtctcaaactcctgacttcaggtgatctgcccgcctcagcctttcaaagtgctgggattactgatgtgagccactgcacatggtcagtggccaggtttctttctttctttctttcttttttttttttttttgagatagagtcttgctctatcgcccaggctggagtgcagtggcacgatctcagctcaccgcaacctctgcctcctgggcccaaatgattctcctgcctcagccttccgagtagccaggattatagggacgcaccaccacacccagctaatttttgtatttttagtagagatggggtttcaccatgttggccagctggtcttgaactcatgacttcaagtgatccgcccgtctcggcctcccaaagtgctgggattacaggtaatgagccaccgcgcccagcccagatttcttatctgagagatcttccactgtttctagatataaaatcatagatttcgccctcccaacttcccattctctttcatgttttatttttctccatagcacttagtgctctctgacctgtcatagtttttacttatttgcttattacctgttttccacactcaaatgtcaaggcaaggatttttgtctattttacgtcccccagtgctttagaacaccacctggcacatagtacggaatcaattaatttattcatttatcatatgaatatatgattctaattgcttcattcattcgcttaacacaggggctggcaaatgataactcatgggcccaagctgcctcgtgttttaaaaattatcttagcttgtatctgtagtcccagctacccgggaggctgagatgggaggatcgcttgagcccaggagtttgaggctgcagtgaactatgatcctgccactgcactccagcctgggcaacacagcaagcccgtccctgtaaaataaattaatttaaaaaattaaaaatgaaaattatggctgggtgcagtggctcacgcctgtaatcttaagacattgggaggctgaggcaggaggatcacttgagcccaaaagtttgagatcagcctgggcatcctggcaaaaccccatctctataaaaaatataaaaattacctgggtgtgatggtgtgcgcctatagtcccagctactcaagaggctgaggtggaaggatcacttcagcctgggagatggaggttgcagtgaaccacgattgcaccactgcactctagcctgagcaacagagacagggtctcaaaacaaaatgaaacaaaacaaaataaaaattattttatttatttacttttcttggtattgatttgacgtttactatttttatattttattattattatttttggtattccgcatattcagaaaaacttctctagtaacaatctatataaaaatgatccctgaaagtagagtcttactgccttattttgaaaataaaatttaaccaatacacggtcaggcccatttgttgacacgctgtctatttttttttttttttgagatggagtcttgctctgtcatccaggctggagtgcagtggccttcaggtctggctggatccaggggctcaggcaatatctcaggacacctcctccccacccttggtctttccatctctctctctctattttttgtttgtttgcttttttgtgttttgagacagggtctcactctgtcaccaaggctggagtgcagtggtgcgatcttggctcactgcaacctccatctcttggcctccagtgatcttcccacctcagcctcctgagtagttgggactacaggtgcacaccacaatgccaggctaatttttgtatttttagtagagatggggtttcaccaagttggcaaggctggtcttgaactcctgacctcaagcaatcttccccgccttggcctccaaaaatgctgggattgcaggcgtgagtcaccgcacccagccctccatctcttaactctgctttcttgtgggtgttttcctccatcctcaatcattcttttccctcatggaggcagatgagggtgaccaactactccagatttatttatttatttatttatttatttatttatttatttaaagtctaagttttgctctgtcacacaggctggagtgcaatggcatagtcatagctccctgcagcctcaaacttctgggctcaggagattctcctacctcagcttcccaagtagttgggactaataggtgtgcgtcaccatgcccaactgtttttttaatgttttaaaaacattaaaacacagccagacatggtggctcacacctgtaatcccagcactttgggaggccgaggcaggtggatcacgaggtcaggagatcgagaccatcctggctaacacggtgaaaccccgtctctactaaaaaatacaaaaaattagccgggtgtggtgacgggcacctgtagtcccagctacttgggaggctgaggcaggagaatggcgtgaacctgggaggtggagctggcagtgagccgagatcccgccactgcactccagcctgggtgacagagcaagactccgtctcaaaaacaaacaaacaaacaaaaaaacattaaaacattcaatggagatggacctcactgtgttgctcaggctgatatggaacttctggcctcaaatgatccttctgcctcagcctcccaaagctcttagattacaggaatgagccaccacatccagcctgctctaaatttatattctcatcactctgagttcgatggaaaataggggggttggctttctggtcactgaagccaaggtcctagcattatccttcgttgaacatgattctttttattttattattattattattattattattattattattattttgagactgagtcttgctctgttgcccaggctggagtgcagtggcacaatctcggctcagtgcaacctccacctcctgggttcaagtaattcttgtgcctcagcctccctagtagctgggattacagacaggtaggtgccaccacacctggctaatttttgtatttttagtagagacggggtttcaccagattggccaggctggtcttgaatgacctcacgtgatctgcccacctcggcctccccaagtgctgggattacaggtgtgagccactgcacctggctgtttgaacatgattctttttttgtggaggtgggaggtggctggtcacatgtctatttctgaaccggctgctgtggccaggagaataccatgctctgatgggccaggccagggtcatgtgcctattccttgagttgaggttggggtggcttccacagaggaaactgaggaactgttacctcagaagggtaaataagatgtcaggaggcaatcagtgtttatatgggcagtgacttctaaatttaagccagaatttctgattctcagtcctgttgacatgtggggccggatcattttctgtcctgggagctgccctgtgtattctaaaatgcttagcagtatgcttggactctatccatttcacacaagtagcacctctcctcagtatctccagacattgccaaatgtcccctgggaggcagaatcgccctgggggcgggcaaaccagttttggagggagtgagcttgctgtcttggggaaaatccaaagagatctgatgattactggctgagaacagcaaagaagagattgagggcttctttgaattagaatatttattttaatttctttctttctctctcctttcttcttttttttttttgacagagtctcactctgtcgcccaggctggagtgcagtggcgcgatctcgtctcactgcaagctccacctcccaggttcacgccattctcctgcctcagcctcccgagtagctgggactataggtgcccaccaccatgcccagctaattttttatattttcgtagagatggggtttcaccgtgttagccaggatggtctcaatttcctgacttcatgatccacctgccttggcctcccaaagtgctgggatttcaggcatgagccaccgcacccggctctttcctttcttttctgttctgctttcttttcttttctttccctccttccttccttccttcctttctgatggagtctctctctgtcactcagactggactacagtggtgtgatcttggctcactgcaacctccgcatcatgggttcgagtgattctcctgccttggcctccagagtggctgggtttataggcatgtgccaccatatccggctaatttttgtattttttagtagagaaggggttttgccatcttggccaggctggtctggaactcctgacctcaagtgacctgcctgccttggcctcccaaagtgctggattacaggcatgagccactgcacctggccttattttttatttaatgatggggagaggccagacgtggtggctcatgcctgtaatctcagcaccttgggatgctgaggcgggtggatctccaacatggtgaaaccccatctctactaaaaatacaaaaaaattagccggccatggtggcaggcgcctgtaatcccagctactcgagaggctgaggcagaagaatcacttaagcccaggaggtggaggttgcagtgagctgagatcgtgcaagtgcactccagcctgggtgagagagtgagactctgtctcaaaaataaaataaaataaaataaatgctggggagaggaagaggggaggaagactcatttgatgttattttatcatcagtgataagggctacactgattgctggggttacagcacaggacataatggacacagttaatacttttctgagttcatgccctcttgagggagggggtggtgtttttgttccttgtggcttttgtaacaaagaaccacggatcggatgtcttagaacaaaggacatttattctctcataatcctagaggccagaggtctgaactcaaggtgtctgcagagctgtgctccctctgggggctccaaaggagaatctttctctgcctattcctgcttctgggggctccagatgatccaggacaggcgagcccctagattggggcttagccctggagggttcttggcttcacccaggaaagaattcaagggcaagctggtggtgttagcaagttttattgaagcaaccatgcagagcagcagcagaggtactgttccttgcagagcagggctaccccattggcagtgagcccagagtagcagctcagaggcagtgctgcaggcatatttatcccgttttaattatatgcaaatcaaggggtggattatgcagagatttctagaaataaagtggtaacttctgagttgtcaggtctttgccatggaagggggcatcagcttctgggtgttgccatggcaatggtaaactgacatagcactggtggccatgttttatggagaggcacttttgcctcttccctgtttcagctagtcctcaatctggtccagtgtctgagccccacctccagagtcgagtcctgcctcctatttcacatgcatccttggattgtgactccatctttacatggttttctcctatgtctgtctgtgtgtctcttacaaggacacttgttattggatttagggcccacctggatgatcccagatggcctgggtgggtcttaaatatctcctcatcttgaagtccttgagatacctcctcatcttgaagtccttgagttatctcctcatcttgaggtccttgagatatctcctcatctcgaggtcctcaagctatctcttcatcttgaggtccttgagatacctcctcatcttaaggtccttgagttatttcctcatctcgaggtccttgagataactcctcattttgaggtccttgagatacttcctcatcttgaggtccttgagctagctcctcatctcgaggtccttgagctatctcatctcaaggtccttgagctagctccttatcctggggtccttgagctacctcctcgtctcaaggtccttgagatatctcctcattttgaggtccttgagctatgtcctcatctcaaggtccctgagacatcgccccatctcaagatccttaccttacatcttacaaagtcgttttctccaaaaaatgttcacaggtcaccttcacagcttccagggatttgacctggatacatctttagagggggccagacccattccagacagtaaacaaatagacaaaacgctggcacattgtaataaatgtcacagatgaaacaaacccagggatcaaggggaagaagaagaggagggcatgctttctggagggtggtcaaggaaagctgagagctgcaggaggaggagccagctctgggaagcatgaggcagagagggcaaagactgtgcaaatgccctaaggtgagaagaatcagaatgaaggagcttctggaaggaagggagtgagtggagggagagtggtaaagaatgaggtttgggaggaaggtacttacctagaatggctatggggatgtgtgtggaacttaagggggggatgggaaatccttggagcatttaagcagatcaattgtttaaagaggtccctgaccaggtgtggtggctcatgcctgcaatcccagtgttttgggaggttgaggcaggaagatcacttgaggccaagggtttgaaaccatcctgggcaacatagtgagatcccacctctacaaaaaacaaaaaaagaagagagatctggaaaaagaaggttgatgaaggcatccccatgagaagtgatggtggcctcgactgggagttgggagtcatggatccagctcacattttcattgaggaggaagggtggaggtggatgaaaagaggaggcaggtctcatattccaggaaggcaagaattaaaaaaaaaaaggaatgaaatgaaatgaaaagaggaggcagggtggtgtctaggtttacagcttagggacttgcgtgaattagggtatcttctactgtagtaggaagactaggggaggaacaggtcttggggagtttgatcaagcaagggaaggaaggcagtacagcataatggctagcacatggttcttttttctgttttgttttgttttgtttgtttttgtagagacagggtctcactatgttgcccaggctgctcttgacatcctgggctcaggtgatcctcccatcccagcctcagtgctgggattacagggcatgagctaccatgcatgtccggtgcatggttcttaactaaggggtggtgtggggcagcagtgggggcgaggggagtgactctgtcctcccaggggacatttggcaatgcctggagacagtttcagttatcactactggagggcttggtgtgttattgatatctattggatagaggccagagatgcttctgagtgtcttccaatgcccaggacaggcccctctcccaccaaatgtcaacagcgctgagaccgagggactcagtgctaggcacatggactccagttgtgtggggggtccaggttccagtcacagctgtgggatcttgggcaagttatcaaatgcttcaagaaaggaccatatatatggccgggcgcggtggctcacacctgtaatcccagcactttgggaggccgaggcaggtggatcacaaggtcaggagatcaagaccatcctggctaacacggtgaaacctcatctctactaaaaatacaaaaaattagccaggcatggtggcgggtgcctgtagtcccagctactccggaggctgaggcaggagaatggtgcgaacctgggaggcggagcttgcagtgagccgagatcgcgccactgcactccagcctgggtgacagagcgagactccatctcaaaaagaaagaaagaaagaaagaaaggaccatatatcaaaaatgaccccaaaagcagagggagccaagacaccaaagaatgcagcagacaaatcctgtttgttggtaaagggtgatttgttgggggagcttatggagagaagaaacatggtcttgggcggcggcaagacaggtacctctctgcaccattacctcacagacccagtgcttatatagtacaggaaaatgtgcaggacccagtgcttatatagtacaggaaaaggcagtcctccagaacaggcaaaaacaccgtgcacatcacagcctataatttgtatgataacatcaagtttgctttgatatgttcttacactagggacagcaaataatgtagaactcaggagacattcccgggagtggggttaatcagaagtcaacatggcaattagcatccaagatggggccactttgtcttcacacagaacctctctgtgactcagtttccctatctttcaaatggagataaaactagtccctaccttataggattgttgtaagaattaaaaatgaggtaataattgtaaagtcgtaaagtgcttcaagcagtatccattaaatgattgataaataaatcattggtaaatgatttaccagtgatactgataaatgacttctttatcatttatgaaaaattgataaatgatttatttaccaataaaccaacggtaaatgatttatttaccaataaaccaacggtaaatgatttatttaccaataaaccaacggtaaatgatttatttaccaataaatcaacggtaaatgatttatttaccaagggtaaatgtcactcattgataaatgacttattggtaataaatcaattattagtttattggtttattggtaataaatcatttatcaatgagtgaaatcatttgggacaaagaagagagagggaaaagaggtggtctgagggttgggccttaggttgtaacagcatagaaacattggggagaggagaatacagtgactgaagaggaaaaccaggccaggcgtggtggcccatgcctgtaatttcagcattctgggaggctgaggcaggaggattgcttgagcccaggagtttgaggctgcagtgagctatgattgcatcactgcgctcaggcctgggcgacacaatgagattctgtctcaaaacaaaacaaaaaaacaaagaggataaccagatgggtgtggtgtcaagagaccaatgccgttgagaggagtagattcagaaagtgtcatgaatagcaacaaaagcaataggtcactttaatgagcacccactatgttcaggtgttgttctaggtactttatacttattaacacttttgaattttcacaacaaatccatggtgttggcaccatcatatatttaggttattagttattgctgtgaaacaaaccactccaaactgagtgatgtaagaaaaacatgatttttgattctcacagattctatgactcaggaattcagacagggcatagtgatgatggtgcctcagctccatggtgagaaactttgactttctgggaactagaatgctctggaggattcttcgtcacatgatgggtgtctgggctgggatgacttgaggctatgctcagttggggctattgactggagcacttacgtgtggtatctccaagtggcttgggcttccccacaacatggcgaccgggtttcaagaaacccggagagagagcaagtattcctcaaaaagatcaagccagaagctgcaaggcgtcttctaacctacttggaaatcacgcagtgtcacttacagcagttttcgtaacaagaagccataccctggcttctctcttcctaccctaggcaccagcagggacctccaattggctgaacctatctaggagcagggtgcaaaggagcctgggaaatgtagttgtcttcctggcagcgcaaaacaaaggaaggggatgagtcattaaccaatcaggttaatgacctacatgaaccttgagcaaatgaccctccttctctgaactctgtgtatcgctcgcgaaataggagccctacttcattgcaggatcgttttgaagaccagaggagacagttgtaatgcacacgaattgcttcacccagggcgtagttcttttatttatttatttatttatttattgaattaattttatttataactctaatgggtaagcagcctggttctcaattgatgggagctgtcaatattgctattggtctgagaactgatgatacgtaacggtttactatgtcctggcacagggtggcacgtcttagctctactggtcctgctggttttggggtttagtccactctttttgcttgtttgtttgtttgtttgttttttgagatggagtctcactctgtcgcccaggctggagtgcagtggtgcgatctcagctcactgcaacctccgcctcctgggttcaagtgattctcctgtctcagcctcccgagcagctgggactacaggcgcgtgccaccgcgcccagctaatttttgttatttttagtagagacagggtttcaccatattggccaggctggtctcaaactcctgacctcgtgatccgcccgtctcagcctcccaaagtgctgggattccaggggtgagccaccgcacccggctagtccactctgagatcaagcctagatatcctttcttgtgaccgtctctgccatgagctaccaggacatgacgaatctgccttccttcttgctgcctgttagagatataccctggtgatctaatcacctcttaaaggtcccgcttctcaacaccattgcattggggattatacgttcccaacatgtgcacattcaaaccatagcagcgtttaagcactccaaggatatgggtctactgccttcagcctgacttgctattgagtgtgtactcgagagagaggtgggagaaatacttcaaaggcttcaaaatcatttatttgtccttctttatagggaccccgggagatatggcagaatatggggtgcttggggtgacagccacttgctgcattttgattacatggccacggtttgggcatatcggcacctgagaccacccttggttcactcccttcctccctccccctcgcttactctgctccaggcacacagatctcctggctccaacatgccagggcctcagggcctttgcactggctgttccctctgcctgaaatgcttttttctcagagcctttgcactaacctcagggcttcttgtactaacctcactggctattccctctgcctgaaatgcttttcctccagacacccacctggattgtcccctcacctccttcaaacctttactgaaatgccactctctcaatgaggcttcctggacttccctatttaaaattgcaccccctcctgacattctccattccttttcctacttatttttttctcgcttaacacttaccaccttcagacaagctatgtaatatactcctacaataccttcattgtcttcctttgccagaatatcagccccttgagggcagagatgcttatctctttggttcatagctgtatctccagcacctagaccagtactgggtgtatagtaggtgctcaataaatatttgcatatttggccaggcacggtggctcacatctgtaattccagcactttgggaggccgagacgggtggatcacttgaggtcaggagaccagcccagccaacgtgacaaaaccctgtctccactaaaaatacaaaaattagccaggcatggtggcaggtgcctataatcccagctgctcaggaggctgaggcaggagaatcacttgaactcaagaggcggagattgctgtgagccgagattgcagcactgcactccagactgggtgacagagtgagactcagtatcaaaaaaaaaaaaaaaaaaattgcatagtgaatgaaggagtgtctgaatgatcaaagccctctcacctgctactccctttgcttggagcctttttacccccttcacactctaaagtaagaatagtttgaattacaaagaatacaaatttatctctcattcactatgttttatcaagagtaggagcaaaatggccgggcacagtggctcatgcctgtaatcccagcattttgggaggccaaggcgggcggatcatctgaggttgggagttcgagactcagcctcaccagtatagtaaaacccagtctctactaaaactgcaaaattagctgggcgtggtgacgcatgcctgtaatcccagctactcaggaggctgaggcaggagaattgtttgaaccccgggggcagaggttgttgtgagccgagatcgtgccattgcactccagcctgggcaacaagagtgaaagatcgcgccattgcactccagcctgggcaacaagagtgaaactccgtctaaaaaaaaaaaaaaaaaaagagtaggagcaaaaatatgactaagactgtattttgcattattgaccaatgatggtttacattatttccttattttccaccccatcctcccccacccactccctaagctgatagtcatcctatgcacctagttttaggggaaagacacagcagggcagccagtatcctgctgacttaaaaaaaaaaaaaccagctatattgacatacagtaaattacatatttaaaatacattggtggggcgcggtggctcacgctgtaatcccagcactttgggaggccgaggtgggcaaatcacttgaggccaggagttcaagaccagcctagccaacatggtgagaccctgtctgtactaaaaatacagaaattagccaggcatggtggcacgcacctataatcccagctactcaggaggtggaggcaggagaatcgcttgaacctgggaggcggaggttgcagtgagcggagatcgcatcattgcactccagcctgggcaacagagtgagactctgtctcaaaaaaaaatatatgatttggtaaacaattttttctttaatttctagatttgttttcagaaacggtcttggcagggcatggtgcctgaagcctgtaatctcgcccctttgggaagctggtgtgggaggattgcttgagtttaggagatcgagatcagcctgggcaacatggtgagaccagcctcatctctaataaataataaataaataaataaataaataaaataattagctggtcatagtggcatgtgcctgtagtcccagctacttgggaggctgagatgggaggatcatttgaacccaggaagtcgaggctgcagtgagccaggattgcaccactgcactccagtctgggtgacagagtgagaccctgtttctccccttcccccccccacccaaaagaagggggaaaaaagaaagaatcagggtctccctatgttgcccagactggccttgaactcctggactcaagcgatcctcctaccctagcctcctgagtagctgggattacaggtgtgtgccactgaacctggcctgatttgataaattttgacatatgtgtgcaactatgaacccagccttgaaatcaatggatcatatccattgcccctcaaagtttcctccatcccacccctccctgcctccccctcctcccacctctcattccctcgtacctcctgatttgctgttagtcactgtcgattagtttgtatttcctggagttttatgtaagtggaatggtaccatctgtggtcttctgtgactggctgctttccctgagcatgatgtcctggttcatccatgttgttgtatgtatcagtgtaccattctgttgtacggatgcaccccagtttgtttatccattcatcccttgatggaggtttttttgtttgtttcgctttgtttttttgagatggagtctcgctctgtcgcccaggctggagtgcagtggcgcaatctcggctcactgcaacctccgcctcccaggttcaagcgattcttctgcctcagcctctcgaacagctgggactacaggtgtgcgccaccacgcctggctaatttttttgtatttttagtaaagacagggtttcaccatgttgaccaggctggtctcgaactcctgacctcataatctgcccacctcggcctcccaaagtgctgggattacaggcgtgagccaccatgcccggcctatactttaagttctgggatacatgtgcagaacgtgcaggtttgttacataggtatacacgtgccatggtggtttgctgcatccatcaacccatcatctacattaggtatttctccgaatgctatccctctcctaacccccagcccccgacaggccccagtgtgtgatgttccccttggttgaggtttgaattactgatggcacttttggctatcatgaatcaagttgctagctggatatggtggcacatgcctgtagtcctaactctttggaaggctgaggcaggaggattgcttgagcccaggaatttgagactgcagtgagctgtgattgggccaggctgcactccagcctgggtgacagactgagactgtctcaaaaaaaaaaaaaaaaaaaaaaggaaagaaaagaaaacagaatcaagctgctatgaacattctgtacaagtctttgtatggacatgtgctttcatttctcttgagtaaatgcctggtaatggaatatatcgtatgataggtgcatgcttaatgttttaagaaaacttaccaggccagtcacggcggctcatgcctgtcattccagcactttggggaactgaggcgggaggattgctggagcctaggagtttgagaccaacctgaccgacatagtgaggctctgtttcttaatttttttttttaataagaagaaaatgtaccaacttttcttcctttgtgctggaattgcaaggtaaaaaaataatagtaataacaaggaaaacgtaccaacttttccaaagtggatctgccatgtgatgttcctgccagctgctcagcatgcttctcttctttgcttcactatctgtctcattttttttttttgagatggggtcttgctctgttgcccaggctggagtgcagtggcatgatctcggctcactgcaacctctgcctcctgggttcaagcgattctccttcctctgctttccaagtagctgggactacaggcgtgttccaccacacccagctaattttgtatttttagcagagacaggtttcactatatgttggccaggcgcgtctcaaactcctgacctcaagtgatcaacccacctcagcgtcccaaagtgctgggattacaggcatgagccaccacacccagcttcttttttttgttttgttttgttttttgtttttttgagacatcctcggtctgttgcccaggctgtgcagtggcgtgatctcggctcactgccacctccgcctcctgggttcaagcgattctcctgcctcagcctccagagtagctgggattacaggcgcctgtcaccacgcctggcaaatttttgtgtgtgtgtgtgtgtgcagtcggggtttcaccatgttgcccaggctggtcttgaacccctgacctcaagtgatccgcccgcctcagcctcccaaagtgctgggattacaggcgtgagccaccgcacccagccgctcaccatctctttgtcgcctgcatggcaccattctctcctgtaccaccccaaagccttaccaggtgcctcctgcatttaaccaggtcccatagctctctgtgcttcccggcacaccctctcaccaccctcatcatcaattattcaccttgctgactgcttagtgtttgtctcctggctggattacataagccctgtaagggcagagctctgtttgtcttgatcaccattaggttctggtgcttggcatacagtaggcattccacacatgcttgctgaattaatgcatgaccgggtctggggtgctgggtttcacaccaggctctaccgcaaacattgggtcaagtattttcattcccgacgtacagatgagtcaattgaatcaacggaaagcaaaatgatcccatccaagctccctcaacttgccgggctggtctgggagtcgaaccagatctgcctgaccctcccaccggtgctgaaaagtggagtgtgtgctggggtggtaggggatggggcagaagagagacgggcttcctcacagaagggtttgagggctaggatgaggcgtgcacactctgcacccctgcttcggagctttgaaagggtgcacagcacacccgccctctctgggaaccctcgggagcttgaggttgcctgatgaaggggctgatgggttgaacgcaaagggcccctccacccacccttttttctatctccccaaccaagccctggtaacaggcatttccggtttccggccggctccctggtgctggggtgggggtggggagttgattgctgccgtcgtgcttggctctgggtccccttctcccagaccccagaggcctctgtccctgcacactgcttccccgaaggagcgtggaaagccagccgacctttctggctctttcttcatcttgggcaggggttttgttgatgggaggctggctggcaaatggggaagaatgaacctcagggttcaccgcagtgcgcctgggtgctgatttgcatatgggcacgatgccagcacagtgggtgcccgcctcttcctggaggaaggaagaggggcactgaggggggttgcccccagcagggaggaaccgtcctcataatgcctctcctacgtttgtttaaaggaccatcattctcagcaaactatagcaaggacaaaaaaccaaacaccgcatgttctcacttataggtgggaattgaacaatgagaacacatgggcacaggaaggggaacatcacacacaggggactgttgtggggtcggggaagtggggagggataacattaggagatatacctaatgctaaatgaggagttaatgggtgcagcacaccaacatgacacatgtatacatatgtaacaaacctgcacgttgtgcacatgtaccctaaaatttaaagtataataataataaaattaaaaaaaataaaggacctcctgtcctttgccactttctcacactcttcaggcgaccaggaagtcctttctggtggtctaactgcagtcactgctgctgtctgatggagcccctttctttagctggccccaccgcagcccggagaggggatgaatcatgccccctttcccctctttgaggcatcacatgactggaaggaagctgtctccgggttcagctgatctccctgaggtcaggagggaacttcctccctcgagccacagacacagccatctgctctattgtctctggtgatctgcctgcccatgagcgccctcattatgccactctctaagaggcaccaggagcagcttagtgtggttcaaagaggcagtgttgtacagaggttagaggcacagactttgggatccagtgctggtatctggttctccattcctatctgtgtggtccgggatgggcagtatcccctctctgagcctcagttgtttcctctgtcaaagggagatttattcattcgacagattttattgagcatctactatgtgtcagacatggtactaggtattgaggtcctctatttacccaaaggagttgaacatttatgtccacacaaaaacttacactcaagtctttgtagcggctttattcatgattgctgaaactgggaggcaacaaattgtccttcggtagatgaatgcgatgtagggcaaggcaagccctaaattggggctcagcctgggacggttctttgttttgcccaggaaagaattccagggcgagctggaggtgttagacagtagcttttactgaagtgaaagtgcatagcggcagttgcagaagtcctgctcctcgcagagcagggctaccccacaggctgtgagcccggagtaatcagggttgcagtcatctttgtacccactttaattatatgcaaattaaagggcagattatgcaaatttctaggaaaagggtggtaacttctgggttgtcgggtcattgccttgggaaaggagtagtagctgctggtgttaccatcacaatggcaaactgccatggcacactggtgggcatgtcttatggaaaggtgcttctgctccagccctgttttagctagtcctcaatttggtccgttgtctgagccccacctccagagtcaagttccacctacttcctcgtatggataaataagctgtggtgcatccagacaatggaatattattattattattagagatggacttttgcccttgttgtccaggctagagtgcaatggtgtggtctcggctcactgcaacctctgcttcccaggtccaagctgttctcctgcctcagcctcctgagtagctgggtttactggcacctgccaccacacctggctaatttttgtatttttagtagagatgggatttcaccatgttggccaggctggcctcaaactcctgacctcaggtgatccagccacgtcggcctcccaaagtgctgagattacaggtgtgagccactgctcccagcgcagacaatggaatattattcagcactgaagagagatgagatgagctctcaagccatgaagagacacgcaggaaccccaaatgcatattactaagtgaaagaagccagtcccaaaaggctacatactatatgataccagctatgtgatgtttcagaaaaggcaaaactgtagaagcagtaaaaagatcagtagttgtcagaggttagtggaaagggggtatggataggcagagcatggaagctttccacggcagtgaaaatactctctatgacactataatagtggatacccatcatcatacatgtgtccaaatccagagaatgtgacgcacggcaggcaagccccaaagtggggcttagcctgtgaggcttcttggtttcacccaagaagcctcacaggctaaggaaagaattcaagggtgattccagtggtagggtagacgaaaacagctttattgccgtggcagtgttacagctccatgactgctcttgcagggctaccccacaggctgagagtagcagctcagggcagtttggcggtcctatttatatttatttatttatttatttagagacagagtcttgctctgtcgcccaggctggagtgcagtagtgcaatctcagctcattgcaacctctgcctcccaggttcaagcaattctcctgcctcacccttctgagtagctgggattacaggcgcgtgccaccacgcctgactaacttttgtatttttagtagagatgaggtttcgccatgttggccaggctggtctcaaatttccgacctcaggtgttctgcctgccttggcctcccaaagtgctgggattacaggcatgaaccactgtgcccttcccatacctccttttttttttttttttgagacggagtcttgctctgtcgcacaggctggagtgcagtggcgcaatcttggctcactgcaagctctgcctcccacgttcacgccattctcctgcttcagcctcccaagtagctgggactacaggcgcccgccaccatgcccggctaattttttgtatttttagtagagatgagttttcaccatgttagccaggatggtctcgattgcctgaccttcctgaggcgtgaaccacccgcctcagcctccctaagtgctgggattacaggtgtgagccaccgccccccggcccatacctccttttaattacatgtagagtaaggggcagtttatgcagaaatttccagggaaggggtagtaacttttgggtgatcaggtaattgccatgaaaagcggtggtaaggccgggcgcagcggttcatgcctgtaatcccagcactttgggaggccgaggcggatggatcacctacagtcaggagttcgagaccagcctggccaacatggtgaaaccccgtctctactaaaaatacaaaaattagctgggtatggtggcacacacctgtgatcccagctactcaggaggctgaggcaggagcatcgcttgaacccgggaggtggaggttgcagcgagttgagatcataatactgcactctagcctgggccacagagcaagactccatctcaaacaaaacaaaacaaaacaaaaacaaagaaaatagaccagttgtggtggctcacatctgtaatcccaggaccttaggaggctgaggcaggaggatcacttgagcccaggggttcgagaccagcctgggcaacatagtgagaccctcatttctacagatacacacacacacacacacacacacacacacatacacgcacacacacatgagttggggggatggtttcaggatgaatcaaccacattacatttattgttcactttatttctattattattacattgtaatatataatgaaataattatacagctcacacatatgtgtatatatatatgcacacacactatatgaatattatatatagtaatatttattcatttatatgaataaaaaagaaactaaaagagaggaggaaaggaaggaaggaagaaggaaggaaggaagatcagcctggagtctctggactgccctgatggaagtgtcttggatgctaaaggggtttatgggctgattccctcaacttcctcccgtctaacaaggtctggtgttccatcaaggcagtggctatgctcccaagaagtttgcaaatgacagaaaacctaattacaggtcaacaaaccatgacctgtgggccaaatgcagcctgccacctgtttttgtaaatgaagctcttttttttgagatggagtctcactctgtcacccagcctggagtacagtggcacgatctcggctcactgcaacctccgccacccgggttcaagcaattctcctgcttcagcctcccgagtagctgggattacaggtgcattccaccacgcccagctaatttttgtatttttagtagaaacggggtttcaccatgttggtctggctggtctcgaactcctgaccttgtgattcacccgccatgggctcccaaagtgctgggattccaggcgtgagccaccatgcacggccaacaattttttttaatgaaaataattttttctcaatgccgttttggaagagaagcaaactcgtatgtgggttttaagtatggcttcattcagtagctccaacaatgtcatcaaggactgcatgtctctgtgatggattccttttctggctttgtaaatctaggatctcccactcatggcagcaaagtagctgcagttgctccagaccgcctaacctcactcttgaccaacacagcggagagtaaatcactgtcccagaagctggagcttaagatccgggatttgcactctctcattggtctgaagtgggtcatgtgttaatctctgaaccaatagtcataggcaaggggatgggccatgctaattgactggaactgggggtggagcccctctcagcccatgttgctagaagagaaagaggaaagggtatggatgtgtgcataattagttaatgaatatattcattctttccaccatccctcattgatttgtctactgcgtcccagcagcagggaatgtgatggttgataagaacttgtttctgctctcatggtgatcccagtctactgggattccacgatctgttcagacaggtacaacctgttgtaatcaatgctgtgtattcattaggatagaggtttggctactgtaacagttaggtagagattaatttatcatctaaacctatagagcagcagtctccaacctttttggtagcagtgaccggttttgtggaagacaatttttccatggaccagagttaggggggatggtttcaggatgattcaaatgcgttacatttattgttccctttatttctattattattacattgtaacatataatgaaataagtatacaactcaccataatgtagaatcagtgggagccctgagcttgttttcctgcaactagatgatcccatctgggggtgatgggagacagtggcagatcatcaggcaccagattcccgataaggagcgcacaaggtagatccctcacatgtggagttcacagtagggtttgcactcctatgaggatctaacgctgcagctgatctgacaggaggtggggctcaggtggtaatgcgagcaatggggagtggttgtaaatacagatgaagctatgctagctcacctgcccaccactcacctcctgatgtgtggcccagttcctaacagaccatggaccggtaccaggaggcttgtactgggagctactctggaggctgaggtgggaggatcacttgagcccaggaggtggaggctgcagtgagctgtaatcatgccactgcactcaactgggcaacagagtgagaccctgtcttttaaaaaaaagttaaaatcactcctgtaatcccagcactttgggaggccaaggtgggcagatcatgaggtcaggagttcgagactagtctgaccaagatggtgaaaccccatctctactaaaaatacaaaaattagctgggcttggtggcacacacctgtaatcccagctactcaggaggctgagcaggagaatcgcttgaacctgggagccagaggttgcagtgagtcgagattctgccactgcactccatcctgggtgacagagtgagactctgtctcaaaaaaaaaaaaaaaaaaagaaaagaaaaagttaaaaaaaaggccgggcgcggtggctcaagcctataatcccagcactttgggaggccgaggcaggtggattgcctgaggtcaggagtttgagaccagccttgccagcatggtgaaacccgtctctactaaaaatacaaaaattagccaggtgtggtggcaggtgcctgtaatcccagctactcgagaggctgaaggaggagaatcgcttgaacccaggaggcggagtttgcagtgagccaagatcacaccattgcactccagcctgggagacaagagtgagacttcatctcaaaaaaaaaagttcaaaaaaaccccaaccaattctctcctccccaataattaccttaggacaacaggcataagcttgggtcatccttggcaaactaggaggtaagtcactctatgtagcagagaaccaaagtaacaaggacttaaataaaactgaagattatttatttcttatgcaataatctgagcttaatcagtccaaggctggcatggtcctttctacaatgtcaaagaccagctcctcctgttctgttcttccgccacctgtgaatttcctttgtcctcagtttccaagaatactcatcaccatactcacttgccagccagataaaggggctagaatgttcctccctttaagaatgcaacctggaattgcacattatcagttagcttttgctgtgtaacaaacagtcccctaaaatggaatggcttaaagacaatatttgttattccaattaatttagtaaattgtctgggcagataggtgatctctgtggttagctaataacttggctggggtaggtagtctaggagggcctcattcacatatctgctggttggccagttgattagtataggatacctttagctaggtgcttgtctctgctccacacggtctctcatcctctggcaatttagcctgagtgcttgaatttggcaggagtattccaagaaagcaacaggagaagttgcaaagcctctatgggctaaagcgagccacaagaccaacccagatacaaaagatgaagacttagaatctacctctctttttttttttttttttttttgagatagggtcttgtcttgtcgcccaagctggggtgcagtgacttgatcttagctcactgcaacctcaaactcctggactcaattgatcctcagcctcctgagtagctggaactataggcatgtgccaccacacctggctaattttaaattcatttgtagagacggggtcttgctttgttgccaggctggtcttgaactcctggcctcaagcaattctcccaccccacccaatcctcccaatcatgtcttggggttacaggcatgagccaccatacccggcaattctctttggctggtaggagctggaaagtatttgtaatctaccacaaagggcattcagggcagaggcaaccttatatatgagacctggagatgagagacagtaaaataggtgcatttagcgtgtggcaaccacttccacctggctggagcagaggtgggagaggtaagtgagaaaaaaaagagtagagtcatcagagaagtcagcaggggccgtggtgaggttgaactttgtgttggggatgatgggggaaccatggcaaggtttcaagaggagattgacatggttagatttgctgtatgaaggtgggctgggaggagtacaaaacggatcaggaagaccactgaggaggctgttgcagccacaaaggtgatcactgcggtggctgctctaggatttgggaacagggatggtgagaagagcttagatgtgacagatagtttggatgtagaatctgaataatctattgattgactggaaatggaggattcaatgaatcctccatttccagccaggtgcagtggctcatgcctgtaataccagcactttgggaagccaagacaagctaattgtttgaggccaggagttcaaaaccagcctggacaatgtaacaagaccctgtatctacaaaaaataaaaataaaaataacgttatctgggcatggtggtgcatgcctgtagtcccaacactcaggaggttgaggcaagaggatcaattgaacccaaaaggtggaggctgcagtgagctatgattgtgccacttcactccagtctgggtgacagagcaagacctcatctctacaaataaaaagttagccaggtgtggtggtgcatgcccatagtcccagctgctcaggaggctgaggcaggaagattgcttgagcccaatttcaaggctgcagattgcactactgcacttcagcctgggcaacagagtgagaccctgtctctaaagaaataaaaataaaaataaacccgactttcaaaacacttagattcgttcctggcttgtagacgatcacctatgaaattactctaacttggccgggcacagtggttcatgcctttaatcccagcactttgagaggcagaggtgggtggatcccctgaggtcaggagttcgagaccagcctggcctacatggtgaaaccctgcctctactaaaaatacaaaaaattagccaggcgtggtggcgggcgcctgtaatcgcagctactcaggaggctgaggctggagaattgcttgaacccaggaggcggaggttgcagtgagctgagatcacgtcattgcactctggcctgggcgacaagagtgaaacgttatctcaaaaaaaaaaaattactctaagttgattctgaaggattggggagtgttgaaaatcatcttgggttcctaagacaaattgctgggtggtaatggcaccattgttagatgaagaggctggagggagagcaagtttgaactggcaatgatgtcaatcttggacctgttaagtttgaggtgcccattgttgaaagaatgaacctgtttccccagctgtaagcaaagaaatggattgcaatgaaaaggcatgctttcaactgttgttccaaaacctttgtcctcatctggaacggaggtacagactgtctcttagttactgtgttattcatttctatttatttatttatttttgagatggcgtcttgctctgttgcccaggctggagtgcagtggcacgatctcagctcactgcagcctccgccttccaggttcaagtgatcctcctgcctcagcttctcaagtagctgggattacaggcatgcaccaccatgcccggctaatttttgtatttttagtagagacagcatttcaccatgtcggccaggctggtctcgaactcctgacttcaagtgatccaccctcttcggcctcccatagtgctgggattataagcatcagcctccacacccagcctcatttatttattcaataaattgtattgggcactattgcatgccaccatgtggtgttcaggattcagaggtgactcaaccctgggtcctgacttcatctggagagagcccagcacaggcgtcttcgttgtcaggcctgggttgaggagggacatcatgttaagggaggctgcagttgggggagaatgaggactctgcttggctgaagacattggggaaggtttcctggaagaagagatattggagatgggccttgaaggatgagtaggagttcaccaggcaaataggagaggaacttttagcccagacagcagtcctttattcatctccctgcatataattactgtaagaatcggcaagagaagctggaatggagatccatgaggtctctgaggatcagacagacacatcacagctaactctggcccaaagggtacttcattaggataacaccagctactgtaacaaacaagacatttcagtgacttcacatggtaaaaattgatttcttgtacacaaaacagtacaatgcatgtgcttctagttccaggtcggggggcttttccccgcagataattcagggacccaggctactttcatttgcagttttgccatcccttagagtctcagcctgcagaaaatagggagagaggaggtatggagaagtaatttctccttaaatacagtgccctgaaagtgatgcttatgacaaatgctcctattctattggccagaagcagtcacatgactgcatccacatgcaaggagagatgggaaatgcagtccttagctgggcagccattttccagcagcaattccatattatggaagagaaaacacgaatattggtggatctttagtggcctctgcccgaggtagacagcaggaatagaactaagggcttggaggcagtaacactcagtttgatttgtgctcttgagtaaacccttcttctcactctttgggtttctctctctgagtgatgagtgaagattggaagctgattaatatctgaggtattttccagtttcaaaaattgaccgggtgcagtggttcacacctgtgatcccagcactttgggaggccaaggcaggcagattacttgaggtaaggagttcaagaccagcctggccaacatggtgaaaccctgtctctactaaaaagaaaatacaaaaattagcagggcatggtggtgggcgcctgtaatcccagctgttcgagaggctgaggcacttgaacctgggaggtggaggttgcagtgagccaagatcacgccactgcactccagcctggatgacagagggagactctatctcaaaacaaaaacagaaacaaagacaacccaaaatacaaaaattgatgggttggtgaatgctcttggtttcccagctggagctaagatgatgatggtggtgatgctcatggtcatgaatactattgtggtaatgatggtggtgatgattataatggtaacgatgatggtgatggtggtgataatgatgatgatgatgatgatgataagaatggtgatgaggagaatggtgatggtggtgatgatgatattactatcataatgataatgataatttccagaacttgaaacgtccagccctttttatgcatcatataactgaattacaacaacatgacacagtaggcataaacccttcatgttggttcatttgcctttatccttgttacctatttattgctaagtaacaaattatccccaaacttaattgtataaaacaaccatttattatgcttatggattatttgggtcaagaattctgaaatagctcatctaggcagttcccctttagggtttctaatgaggttgcacacagatgtcggctggggctgcagtcatctaaaggccttagctggagggtctacttcctgagtggctgggccacatagagcttcagctcctctccacctggggctccccacaggactgattgagtggcctcacaacatggtcgccggtgagtggtccaagagaccaaaatggagcttcgatatgtttcattatttagtcttgagaactcacatcttgtttcttccaccctgttcttttagtgacacatggccagtcttggttcaatgtgggaggggattacaaaaaggcatcttaacttatgtatgaatactaggagctatggaccattgggggccatcctggaggctggctactacaaacacattgtcttaattactgtagatttatggtgtcttaatatttggtaggactcataccctttattttccctctgtaggagtatattggctactcatggctgaggttttctatacaaatcttaggatttgtatgtcaagttcaatgaaaagccattctggggtttttaattgaaattggattaaatctatagctcaattttggagagaattgaagattttaaaacttgagtcttggggctgggtgcggtggctcatacctgtaatctcagcactttgagagcctgtggtgggagagtcacttgaggccaggagttgaagaccagcctgtgtgacatagtgacatcctgtctctataaaaaatctttaaaaaaaaattagccaggtatgatggcatatgcttgtagtcccagctacttgggagactgacgcaggaggatcttttgagcccaagaggtcaaggttacagtgaactatgatcgtgccactccactccggcctgggtgacagagtgataccctgtctctaaaaataaatcaatgaatgaataaataaaataaaacaaaacactgagtcttgctagaaaggaactggtatatattctattttgtttaggtcactagctttatgcagttttgtttcacatcttctaggctatggtcaatagtatccttttaaaatcaaagtctgatttccctatgtgaaaagctaaattcttcattttatcattcaatcagttctagcaactgtggacacttgtgcaatccacacccttatcaaaacagaacatttccatcacttgtggcctctctgagtcaatctctaccttccctcttgctccggaagcaaccactgatttgatttctatcatcataggttagttttgcttactgtaggatttcacaattttttttttaatttgtgagttatttttgcttatgtactgacacttagtacactttgtatactggttttgtattcagccacactgccaaataattttattaatttcagctatttatctatatattctttgggaatttctatgttgatgattgcttcttctgcaaaaatgactttctttctttctttcttttctttctctccttccttccttccttccttccttccttccttcctttctttctttctttctttctttctttctttctttctttctttctttctttctttctttcctttttccctctgtcttgtcttgcagtacaggctgagatcttcaatacaatgttgaatagaaatggtgatagcaggttccgttgcgtagttctgatttcaaagggaatcttttcaacatctcattattaagtacagtgtttcggtctaggttttctgaagaccttctttatcaggttacagaagttcccttccatttttactttgccaagagatttttttccccctctttcttttgatcaggaatgaatgttgagttgctaccgcatctttcatgtgtcttctgttgcagatttctctttttgacaaaaagagaacaggtcttgggtcagagccttgggcgagcaacagaatctacctagaatttagtaacgttgtttgaaccatatttattctacagttgcttcttcttttatttatttatttatttattttgagacagggtctcattgtgttgcctgggccggagtgcagtggtgcgatcatagctcactgcagcctctacctcctggcctcaagtgatcctcctgcctcagcctcccaagtagctgggactactggccatcacaccaggctaatttttgtattttttgcagagacagtgtctctccgtgttgctcaggctggtcccaaacccctgacctcaaagtgatcctctcgccttggtttcccaaagtgctgggattacaggtatgagccatcacacccatcatacagttgtttctgtttgtagcccgtgagcttagttttgtaggaggatgtaaagctctcttcttaaacacaaaagagttaaagttcatgttccatatgcaatgggttgcatagactgtggcagcaattgagaagatgatacattctgcaaatggaagtgtgagaaacagggttacaacagacattaagtgccaaatgaattcacacacacagctatggcataatggttacgcacaggcttggaagtcatgctgcctgagtttgtatcccggctgtgtgtctcacctcagtttccttctctgtaaaatgaggataataatatgacttaccttgaagagttgctgggaggagtccatgttatctctgcagcatgctgaaaattgagagcatggtgggtggaagctcatgctagcttccactacacacaaggtaaagagaaaaggctgtggtcaagaaagtgggctcagctgggagttgtggctcccacccgtaataccaacatttagggaggctgaggcaggaggattgcttgaggaccagcctcggcaacataatgaaactctctgtctctacaaattttttttttttttttttttgagacggagtctcgctctgtcgcccaggctggagtgcagtggcgcaatctcggctcactgcaagctccgcctcctgggttcacgccattctcctgcctcagcctcccgagtagctgggactacaggcgcacaccaccacgcccagctaatttttttgtgtttttggttgagacatggtttcaccgtgttaatcaggatggtctcgatctcctgacttcatgatctgccctcctcggcttcccaaaatgctgggattacaggtgtgagccaccatgcccggctacaaaaacatttttaaaattagctggatgtggtggcacacatccattgtcctggctgcttgggaggctgagctgggagcattgcttggtcccaggaggtgaaggctgcagtgagctatgattgcatcgctgcactccagcctggacaacagagtgagagcatctctctctcgctctctctctctctcacacgcacacagacacatacgcacacacagacacacacacacacagaacgtgggttctagattcataccatctcggagtttaattgcagctcctcccctaacttactcttgctgttaatctcaagcagcatccccacaccgatctaagcctgctttcttgtaggtaaaatagacacagacgggtgtggtggctcatgcctgtaatcccagcactttgggaggccgaggcaggtgcattacttgagatcagttcaagaccagcctggacaacatggtgaaatccccatctctagcaaaaaatacaaaaatcagctggacgtggtggcacactcctgtagttccagctacttgggaggctgaggtgggagaaccgcttgaacctgggaggtggaagttgcagtgagccgagatggtgccactgccctccagcctgggcgacagagcaagactccatctcaaaagggtataaacactgacagtgtggttatgagaatggagttaatctgaatgcctaaccatgtgtagtaggcatccaagaaatgcattttttttttcttttgagatggaatctcactcttgttgcccaggctggagtgcagtggggatatctcagctcactgcaacctccgcctcctggttcaagcaattctcctgcctcagcctcccaagtagctgggattacaggtgcccgccaccatgcctggctaattttttttgtttgtttttttggtatttttagtagaaatggggtttcaccatgttgcccaggctggttttgaactcctgacctcaagtaatctgcctgcctctgccttccaaagtgctgcgattacagggatgagtcatagcacccagccaaaaaatgcaaatattgttatggtaggggcacagagtaggggttggcaagtatgtcagaatcacctgaggagagtgttaatatgcagattcccaggccccacctccatccatctagttaacaaacatatatcaggggcctcctacacataaggtactatcatagttgctgggcattcaagaaacagaacgatggccctcccctcttcaaactgacattttatttgggtgagataaacaataaacacaacaagagaagcaaaactaaggggatagaaaacgccggagtaggggtgtgggattttatgaaattttaattaatttatgtatatatttattttctgagatggggtctcgctctgttgcccaggctggagtgcagtggcaccgtcgtggctcaccgcagcctccacctcctgggctccaacaatcctcctctctcagcctcccgagtagctgggactacaggcacccgccaccttgcctggctaattttttgtgtttttagtagagacgggatttcaccgtgttagccaggatggtctcgatctcctgacctcgtgatccgcccgcctcggcctcccaaagtgctgggattacaggcatgagccaccacgcccagccttaaatttgtttttgtagaaatgggatctcattatgtggccccaggctgattttgaacacctaggctcaagtgattctctcacttccacctcccaacgtgctgggattacaggtgtgcaccaccacacccagctgactttttattttttgtggagatggggtctccctgtgttgaccaggctggtcttgaactcctgggctcaagtcaacctgggagtgggattttaaatagggtggctagaggaggtctcacagagaaggtgtcctttgaggaaagacaaagacgttggcaaggaactttcttctggatatcagggtgtatttgtttgcgtgggtgccacaacaaagtaccacgagcttggaggcttaaacagcagaaatttatcttctcacaataaatgtcttgttcacctccctatcctcccctcttcttcctcctcgcccactctaactccagccacatgggcctccttgctgttcctccaacatgttaggcaagatcctgcctcaggaccattgcatgcactgttctctcttcttggaatacactttcttgtgtgctatgggttgaactgtgtccccccaaaatttatacattgaagtcttaacccctagtacctcagaatgtggcagtatttggatatggagtatttacagaggtagttcagttagaatgaggtcatctgtgtgggccctaatgcactgtgactgatgtccttataagaagagtaaactagggtgcaggcagggcaagaccacgtcacagtgcagggagaaggtggctgtctactgaaatgagcccttagaggaacctacaaatatctagtcctaaaaagtagaaacaaactggccgggcgtggtggctcacacctgtaatcccagcactttgggaggccgaggcgggtggatcacctgaggtcaagagttcaagaccagcctgaccaacatggtgaaacctcatctctactaaaaatacaaaaataagctgggtgtgatggcgggtgcttgtaatcccagctactcaggaggctgagacaggagaattgcttgaacctgggaggtggaggttgcagtgagctaagatggcaccattgcactccagcctggcggacaaagtgagactccatccccctcaaaaaaaagaaagaaaagaaacaagctatccatgaaaacactttgtgatgtgctgttttatatcacagaatggaacctgtgttttgattcaacaagttcaaaacactcttttcataaaatctaagaagttatgtttctgaacctattgagcctttataggaacatatgaatatccagtcctaaaaactagaaatgagcgatctgtgaaaacactttgtgatgtgctgtttcatatcacagaatgggacctgtgttttgaagaaaccaaccctactgacaccttgatcttggacttctagtctcagaactatcttggacatttcctatgaatagaattgtacaatacatggcattttgtgatttgcttctttcactgagcatgtttttaaggttcatccatgttgtagtgtggaacagtattttgctccttttttatggctgagtaatattccattgtgtggatttgcctgtactggacatttcctataaatagatgcatgcaatacgtggctttggaagatggattttaaccaactctactgacgagtctgctttaggactcttggtccagactgacttcatggagagtgttgggggttgtgggagaggccaagcctacaagctgtgggaagctggtggatggaaggctggttagaattcttcaggatctggggaacctcagagagtgctgaacctgttgggacgttggatgagccaatacttggcaaatgcaagaatacaaaggtttctttctttctttttctttttccagatactcaaaagctggggccatgttacatgtgcccagctgtttcattagttaatatcttttggttgcaggccatggcaaccaaatctaaagtaacttaaacaagaaaaggaatgttttggctcatgaaataaaaaagtttagggatggccaggcatggtggctcccacctgtaatctcagcactttaggaggccaaggtgggcagattcctcaagtccaggaattcaagaccagcctgggcaacatagcgagacctcgtctctacaaaaaatacagaaattagctgggtgttgcgacacatgactgaagtcctagctacctgggaggtggaggcaggaggcatggttttttgtttgtttgtttgagacagggtcttgctttgttgcccaggctggagtgcagtggtgccatcatagctcaccgcaggctcgaactcctgggctcagtgatccactcatctccgcctcctgagtagttcaaaatgtttttcaggtcatccacattgtagtatgaatcagtgcttcattcctttttatggctgaataatattccattgtatggatataccacatttgtttaaccgttagtgattaattttatcttttgtgaattttaactcaataaaaacattcagagcatagatctggatcaggcacaacttaatctttaccagaagataattcaatttcatggaagagggtctgtgctttcatttcccctccacaccagtccccaagctaggtggcctgggggtcagtttctcccctgccctttcgtactgccccaccctcatttctctgtctcctcacagttcctgtgccttaagaacattagaaccttcctgtccacctgctgtgagaagttcggcctcaagcggagcgagctcttcgaagcctttgacctcttcgatgtgcaggattttggcaaggtgagctgcacacttgaagcccaaagactgagtttcagttaatttctattgacgtctacactgggcaagctaaggactgtcaggggacaggcagacaagccagaccaggccatatacaagacgcaaatagcactggcttgggatatgtggaactgggtttgagttcctgctctgacacttgctgtgtgaccttggatacgtggctgtgcctctctgagcccctcgtttctcatctgaaatatgggaatattatcatcctgccctctctgagtggctatgaggattaaatagaaagatagagggccgggcgcagtggctcatgcctgtaatcccagcactttgggaggctgaggtgggcagatcacgaggtcaggagatcgattccaccctggctaacacagtgaaaccccgtctctactaaaaatacaaaaaattagctgggtgtggtggccggcgcctgtagtcccagctactccggaggctgaggcaggagaatcgcttgaacctgggaggtggaggttgtagtgagccgagatggtgccactgcactccagcctgggtgacagagtgagactccgttaaaaaaaatactaaaatataaaagaaagaaagaaagataggagcaaagggtggggctcatttgagagaacgatggtatggggaataggaggtagagaaaatcctgaattaggcttccaagaggcatgggatctagcgcctcagacagagccttgcagctggaagctgtgttctgccgtgggggtgtacaaggggctcactgagtggccactgccccgtcacaggtcatctacaccctgtctgctctgtcctggaccccgatcgcccagaacagggggatcatgtgagtaaccacctgggccttgggccatttagccccagtcctccccctccctgaagccccacttctacccagcccccaggcccctggctcacaccctcctgaccccccaggcccttccccaccgaggaggagagtgtaggtgatgaagacatctacagtggcctgtccgaccagatcgagtgagtgctcaggcctgtggccgcacagctcactggagcaccgtcctgggggtggagggtgtggggggacatggccttgccctccgggaaataaggtcataccctggtgtctggggcacacaaccttgcctgagagtctggggagacacagccctgccctggggtcttgggggacatggcactgtcctggggtcttgggggacatggccctgccctggagcttggagggacatggcctgcccttggagtctgaggtcccacccttggagtcttggggggacaaagccctgcgctggggtctgcggggaccctgctgtgatctgggagaggtccaagggatccctgacctcacaacccacagcgacacggtggaggaggatgaggacctgtatgactgcgtggagaatgaggaggcggaaggcgacgagatctatgaggacctcatgcgctcggagcccgtgtccatgccggtgcgtgacgtggagggtcgggcctggggagggcgtgggcggggggcagccccaggccccccaacaccggcctctcccctcgctctcagcccaagatgacagagtatgacaagcgctgctgctgcctgcgggagatccagcagacggaggagaagtacactgacacgctgggctccatccagcaggtgggcgcctcccacccagcgcctgccgggcgcatgcgcgggagctgggccggcaggtgcacgtccacctgtccggccgctctgggcagctgaggatttcctgctcccatcgcttttcctttctgtgactgtctccgtctctgagtttctctgacttacatatgtatatataaatatgagtctgacgtatatatatattaaaaaatatatataaaatataggacactgcctgcaggagcagtcaaaaaaccaaaaacaaacaaaataaatacaaaatcaaaaatatataaatatattaaacatatacataaatagaaaatatataaatatatacaaagtatatataaaaatataaacatataatatgtataaaatataaacatgatatatgatatttataagatataaaatatatagtttttcatatagagctatatgtaaataatatatacaatatataaatatataaaatataaaatgtagatatattgatataggtatatatctttttatatagatatatatttttaatatacaagatatatgtccatatgtagatatatatacctttatatatcttatatacataaaagatatatatctttatctatctatcttttttttttttgagacacggtttctctctcattgcccaggctagagggcaatggcaagctctcgctttactacaatctctgcctaccgggctcaagcaatccttctgcttcagcctcccaagtagctgggattacaggcatgcaccaccatgctcgactaatttttgtatttttagtagagacgaggttttgccatgttggccaggctggtctcgaactctgacctcaagtgatctgcccacctcggcctccaaaagtgctgggattgcaggcatgagccactgtgcctggcttatatatctatcttttaaagatatatatcattatttaaagatatatatataaagtatgtataagatatgtaatagatacaaatatatattttatatatattttttgttatgttaaccaggctggtcttaaactcctgggctcaagcaatcctcctgtaatccaagccctttgtgaggctgcactgggcctcttcctcttgtctctctgtctctctctttatctctcactctgtctctttttccctctgggtctcctctcgctactttcttcctcagtgtgtcattctctcctttgtagctctttatcccaggctcagtctttttctgtatcctcacctctccatttcttttaaaaatagctttattgagatttcattaatatacatgtaatccacccatttagaatatacagttcaatggtttttggcacacacaagattatgcagtcatcatcactgtctaattttggaatattttcatttgttttgttttggttttttttgtttctttttttttgatttgttttgttttgaaatgtggtctcactctcccatccaggctggagtgcagtggcacgatcatagttcactgcagcctcgaactcctgggctcaagtgatccccctgccttaacctcctgaggagctggggccacgggtgcatgccaccacaccctgcttaattctttaattttttttgtagatatggggtcttgctatgttgcccaggctggtctcctactcctggcctcaagtgatcctcctgccttggcctcccaaagtgttgggattttgggtgtgagccaccaccccggccttaattttagaacgttttcatcatctcccaaagaaaccccaaactctttagctgttccccttcaatctcttatcttcccccggtccatggcaaccacgagcttactcgctgtctctgtggattggcctcttctggacatttcatataaagggcatcacatactatgtggtttatatgtgtctggcttcttttgctgagcgtagtgttttcaaggttcatccacattgtagcctgtgtcagagcttcattccttttcatggctgaataatattccattgtatggatggaccacattttttttttcttttttgagatagagtctcactctgtcacccaggctggagtgcagtggcgtgatctcagctcactgcaacctctgccatccaggttcaagtgattctcctgcttcagcctcctgagtagctgggatcacacgcatctgccaccgtgcccagcttatttttgtagttttagtagagacggggtttcaccatcttggccaggctggtcttgaactcctgacctcgtgatccacccacctcaggctcccaaagtgctgggattgcaggcgtgagccaccgcacctggccggaccacatttgaaacacccatttacccattgataagcattttggttgtttccgcttttgggttattatgaataatttcactgtgaacattcttgtacaagtttttgtgtggacgcgctgcctctctttatctccctctctctgtctccttcccctgtctctctgagactggtctggaggagggaatcttatcttccgtcatctttctctcccttccccgcagcatttcttgaagcccctgcaacggttcctgaaacctcaagacattgagatcatctttatcaacattgaggtgagccggccgatccccagccctcttgggtctgtctagtgcggataacctgctgcccctacctctccctggagtacgggggttgggagttgagcggcatggggcgggtggatgaccctttccttcctggccccctgagccctgggctctggtcccagccctcacccttccctccgagtaggacctgcttcgtgttcatactcacttcctaaaggagatgaaggaagccctgggcacccctggcgcagccaatctctaccaggtcttcatcaaatacaaggagaggtgagacccagctggccagactgaagctctggggtcactctgtcttgcctaggctgggcatctgagagaccttaccctcagacaccactggacggggaggactttttgctgtgtgttcatgggcgaggggctgcccatctctggttcaattcccagctctgctgtgtggcactgggtagtcacttaacctctctgtgcttctgcttcctcatctgtacatcagtgggccacaggaatgtgcctcctaggctggtggtgagggttgactatacggatgcacacagggcctggcacatagtagatgctcaataagtatttgttaaatgaaggaacattggccaggtgtggtggctaatgcctgtaatcccagcactttgggaggctgaggcgggtggatcatttaaggtgaggagttcaagaccaggctggccaatatggtgaaaccccgtctccatcgcctaaaaatacaactaaaatacaactaaaaatacaaaaaacaattagctgggcgtggtggcatgcacctgtaatcccagttactcaggagaattgcttgaacccgggaggcggaggttgcagtgagtcaagatcatgccactggactccagcctaggcaacagagcaagactctgtctcagaaataaaaacaggccaggcgtggtggctcacgcctgtaattccagcactttgggaggccgaggagggcagatcacttgaggtcaggagttcgagaccagcctggccaacatggcaaaaccccgtctctactaaaaatacaaaaattagccaggcatggtggcaggtgtctgtaatcccagctactcggggggctgaagcaggagaatcgcttgaacccgggagatggaggttgcactgagcccagatcacaccactgtactccagcctgggagacaagcgtgaaaccccgtctcaaaaataaataaattaattaaattaaataaaaataaataaacattgggcagagacaataccaggtactgtggtgaaattactgtagcattaaatgagataatgctacaatagcctcacatgggagatgctattgttatgcccatttcacagatggagaaactgggactcaggtttcttctccagcggggaagagcaaggccagggctgacgccagcctctgcccgaccttgatgccagtcacctttacctggtggcctgtcttctccctgtaggttcctcgtctatggccgctactgcagccaggtggagtcagccagcaaacacctggaccgtgtggccgcagcccgggaggacgtgcagatgaagctggaggtgggcgccgggccacttctcgggggcctctcccgctcctccccaggccctgggggcagcagggaggacactgagttgcagatggtccactttctgctgcagcccagccagagatccaccaaaggactagggagggaggtactagccagccaagcagaggaaatggagaagaacagaaatgggctggccctgggtctgggctgacccctgatatcagggtgaagtcctgaccctgaactgagctctgatctcacactcaaccccagccctgggctgagccctagcactgattgtaccccaagtcgggctgagctcccacttctcactgaaccccaattccaaccaacccctgatcccaggctgaacttgatcttgaactgaacttcaacctggatctgtctggtggaaacacagacagggcaggggtggtgaggacgggggctctccagatctgtccccctccccatctccagcccccctcagcaggcagaatactggacctctatcccaggcagcatttgccacattccagtgggtttgtttgtttgtttgttttgttttgttttgtttttttgagacagggtctcattctgtcccccaagctggagtgtagtggcatgatcatagctcaccacagcctcgacctcctggactcaagcaatcctcccaactcctaccttggcctcctgagtagctgggactacagatgcatgccaccattcctggctaatttttgtgttttttgcagagatggggtttcaccatgttatccagggtggtctcaaactcctgggctcaagcgactcacccactcagcctctcaaagagctaggattacaggcctgagcaatcgtgcccagcctcttcccattgcttttttgtttgtttgtttgtctttgttttttgagatggagtctccctctgtcacccaggttggagtgaagtggtgtgatctcagctcaatgccatctctgcctcccgggttcaagcaattctcctgcctcagtctcctgagtagctgggattgcaggagtctgccaccacgccagctatttttttttttttcatagcagagacggggtttccccgtgttggccaggctggtcttgaactcctgacctcaagtgatcctcccgcctcggcctcccaaagttccttccagtggttctcaagctgcccccacctcatggagtccttttcctgtttccttgggggcagatatgatgctttggcctctagaaaaattcccacagctctggggtggagagctgctcacgtatttattcaaatctatctgcacccaccctgcaactggctgtttctgggacctgcctcagtttccccattgttctctgattccccaggaatgttctcagagagccaacaacgggaggttcaccctgcgggacctgctgatggtgcctatgcagcgagttctcaaatatcacctccttctccaggtgccaggcacatctctaggcgtgggctccacgtacctactctcctgtgtctataaaagtggggacggggctggcttctgggggttgggtctctaggacgctcggggatgggtcactggggtcatgtctcagcctccagggtcagcagtacgatggaggagctggtgagctagcattgtttggaaggccctccccgcagggagaaggggaggggcccaggtgacgtctgacgtcttggttctctcaggagctggtgaaacacacgcaggaggcgatggagaaggagaacctgcggctggccctggatgccatgagggtgagtgggtgtagggtgctggtgactcacctgctgcagacaccctcctggtaggggctgatcctctagccgggattaggtaggagcctgggtcggctgttggggggccaggttcacccctgccccctccccaggacctggctcagtgcgtgaacgaggtcaagcgagacaacgagacactgcgacagatcaccaatttccagctgtccattgagaacctggtgaggcggtggagccgggtgggccaggggtgtggccacgtggggagagtgtgtgtctggctcctttcttgggagacccttgctagaccccctgcctactgcataggaccagtctctggctcactatggccggcccaagatcgacggggaactcaagatcacctcggtggaacggcgctccaagatggacaggtgggtggagtcaacatggatctgggatggagcctgggcaaaggggtgggaccaggctcctagatgggcaggtgggtggagtcaacacagatctgggtggagcctgggcaggggcggggccgggcttctagatggacaggtgggtggagtcgacatagatctggagcagagcctgggcaggggcagagccaggcttctagataggcagatgggtggagtcaacacagatctgggaggagcctgggcagggatggtgccaggctcctagatgagcaggtgggtggagtcaacacagatctgggtggagcctgggcaaggtgggggccaggctcctagatgggtaggtgagtggagcaaaccatatctgtggtggagcctgggtagggatggggccaggtttctagataggcagttgggtggagtcaacataggtctggggaagagcctggataggggcgtggccaggctcctagatggacaggtgggtggagccaacacagatctggggtggagcctgggtaggggtggggccaggttcttatgtagacttgtaggtggaattaagatgaatttggggagggacctgagtgggggtgaggcaagatttctagacagacaggtggtagacccatccagagaaggcggtggagccttgatggacaggcaggacagggccagcgaggggtatgggtggagcgaagactgacaggcagtagggccaatgcggatcacgtgggtgaagtcaggatggacaggtgggcatggccaagttggccaaggaggaggagaagggcagggtgggaccaggatgtggaggaactggtcagagggctgatggggacagttgggaagagccagacaggaatgcgttatccatccttccaggtatgccttcctgctcgacaaagctctactcatctgtaagcgcaggggagactcctatgacctcaaggactttgtaaacctgcacagcttccaggttcgggatgactcttcaggagaccgagacaacaagaaggtggggctttgacgccggaactatggggtcctccacgcagtcggcagcttagccctctccacttgggcatgtgcctgtttgccagactacatctacatggaagtgtgtgttaatccactcaacaggtgttttttgtttgtttgttttgttctgttttttaagatggagtctcgctctgtcgccaggccggagtgcagtggcacaatctcggctcaccgcaacctccgcctcctgggttcaagcgattctcctggctcagtctcccgagtagctgggactacaggcacacaccaccacgcccagctaatctttgtagttttggtagagacagggtttcaccatgttggccaggatggtctcgatctcttgaccccgtgatccacctgcctcggcctcccaaagtgctgggattataagcgtgagcccactcaacagtttttaaattgagcacctactatatccagggcactcttctaggcactaggactaaaatggaaagcaaaacagaattttcattttgtttgtttgttggtttgtttttgagacagtctcactctgttgttcaggctggaatgcagtggcacggtcttggctcactgcaacctctggctcccaggttcaagcaattctcctgcctcagcctcccgagtagctgggattacgggcacccaccaccatgcccagctaaattttgtatttttagtagagacgaggtttcaccatgttggccaggctggtctcaaattcctgacctcaagtgacctgcccatcttggcctcccaaagtgctgagattacaagcgtgagccactgtgcccagcttattttatttcttgtatggtacttgcgttcttatgggatgctttctacaaagaaaataaagtaggtggctgggtgcagtggctcatgcctgtaatcccagtactttgggaggccgaggtgggagaattgcttgagcccaggagtttgagatcagcctgggcaacatagggagatccccgtctctacaaaacataaaaaaaaatttagctgggcttggtggcacatgcctgtagccctagctacatgggaggctgaggtgggaggatcgcctgtggctaggagttggaggctgcagagagctatgattgcactacagctaggaccacagagtgagatcctgtctctattaaaaaataaatgaatgaaacaggagatgtggctgtggtaggtgagggtgggagggggagctatcttacctccattgttcagggacattctctgtggaagtgacatttaagctgagacccctctccctctcggctcttccttacttccttctgctttttctcctgtgaactcttccgttcgcttcagtttttgccctggagttccccctgtgctctggtctgtggcttctctatttctttttttgagacggagcctcgctctgtcaccaggctggagtgcagaggcatgatctcggctcactgcaacctccgcctcctgagttcaagagattctcctacctcagcctcctgagtagctgggattacaggtgcccgccaccacgcccagctaatttttttgtatttttagtagagacggagtttcaccacattggtcaggctggtctcaaactcctgacctcgtgatccgcccacctcagcctcccaaaatgctgggattacaggtgtaagccaccgcgcccggctggcttctctatttctcaacctgtgtctccctcgaggagccagttgctgtcttgtaactgcctgcttacagcatccgtctctcctaccaggctggagctctggggaccacatcctattcactgctctgtccccagctcctagcagtgtctgtttctcagcaggtgctgcaccaatgctttgttgaacagaaaaatcgatgatgagtgacatgctgtgtctggtgtgtgcttctgcaaaggggagtgtgtgtgtgtgtgtgtgtgtgtgtgcatgtgcacgcctgcgtatgtggttttgggtttatggttgtgtatttggatatcctagaaagcccttttacaaggatatccatgcatggtgctaggggcatagagactgtcatgggcttgcctgttccctacagagggaggggtgggtgggtgtgtgctcccaccctctgcgggggcagtgccttcagtctgagctctgcttccctgcagtggagccacatgttcctcctgatcgaggaccaaggtgcccagggctatgagctgttcttcaagacaagagaattgaagaagaagtggatggagcagtttgagatggccatgtgagtccccgtcttcctccctctttctgtccacagaggggcaggggctgggaaggaggaacgtgatctagtccctactctgtcctgacatgccatgggaccactctgaaccacagtctcttcatttgggaaataagagggacaggcccaaggctgtcttcatccttggaatgcaggggttgtgtgcaagcttcagttaccagcccagactcttctcctttcctcctcctctttcttgttctcctctcctcttccttctcctccttctggtttccttcctcctcctcctcctctttctccttctcctttcctcctcctctttcctcctcctccccttcctcttcttcttcctcctcctctccttcctccccttcctcctcctcgccctcctcttcctcttcctcctattcctcctccacctcttcttcctcctcctccctttcctccccttcttcctcctcctcctcctcttcctcctcttctttctcttcctcctccctttcctcctcttcctcttcttccttttcctcctcctccttcttcttcccctcttcctcctcttccacttttgtcttctctttctcctttttatgtgaggcaaaattccaacaacaaaaatctaacaatttcgaagtgtatgatcgcatggcattttgtacactaacagcattgtgcaaccatcacctctatccagtttcaaaaccttttcatcagcccaaaggagacctcatacccattaagcattcactcccaattccccgctctcgcagcccctggaaactcctagcctgctttctctttctcccaatgtgcatggcagcacgattcagtgtggccaaagggtgaaaacgacccaaaagccaatcaatgaatgagtggacacgcaaaacgtggtctgttcataccatggaatagtattcagccataaaaaggaataaaatactgaccttcttttttttttttttttaattttcccctgccagctccaacatctatccggagaatgccaccgccaacgggcatgacttccagatgttctcctttgaggagaccacatcctgcaaggcctgtcagatgctgcttaggtgagaatctgggaggagggtcctgcataccggacttggtcatcagttccttgctagagaagatggcctagtaattggttccctaaattgggagatgggggagtccctactttgatcttctgcttctccgtcactctcctgatctaaagagaacccaaggggtccctttatgtttttagcagaatatttggccctgtctgtaaaggtcactcgctcttctttatgtgttccctgcatctcagaggtaccttctatcagggctaccgctgccatcggtgccgggcatctgcacacaaggagtgtctggggagggtccctccatgtggccgacatgggcaaggtacgagtgggagggaggctgggaggtgagcttggttctctttggaggatttcccgttctcaccatttcctttaccctcccgtagatttcccaggaactatgaagaaggtaagactttcccgtggtccttcctgtgtaccacaaataatgggcaacagcgcggggaggacccaggacatcctggaactgggcaggatcctttgtggggtgaggagagtaagggggcctacaagcccccaggctgggcataggtagacaggctttctttgtttctccttccaggacaaactacatcgcagggctcaggacaaaaagaggaatgagctgggtgagttggcaggggttgctgtgtgggggcaggaggaaaattcatctctattgatgttgacccagggacagatctccataatcatattaacagccacattgggccgggtgcaatagctcacacctgtaatcccaacaatttgggaggccaaggcgggaggatcgcttgaagtcaggtgcacaccaccacgcctagctaattttttttttttaaatagagatgaggtcttgctacgttgcccagccatactgtataaattaaatcatacagtatgtgcttattttaattaattaatttatttatttctggagatggagtcttgctgtgtcgcccaggctggagtgcagtggtgtgatcttggctcactacaacctccacctcccaagttcaagcgattctcctgcctcagcctcccaagtagctgggattataggcacatgtcaccacgctcggctaatttttgtatttttagtaaagacggggtttcaccatgttgggcaggctggtctcgaactcttgacctcaggtgatctgcctgctcagcctcccaaagtgctgggattacaagcgtgagccactgtgcccagccttaattttaaaaaatttaaaaatatatgtattttattaaatatataataatttattatttaataatatattaatattaattaatataatatagtaataatatattataataatatataaaatatatattaatatatatttattaaaaatatattatatgtatatataatatatcttttttttatttttagaggcagggtcttgctctgtatcccaggctggagtgcagaggcaggagtgttccacttatatgccatttatatgacatataaatatataacataagtcaggtgtggtggttcatgtctgtgatcccagcactttgagaggccaaggccaggagtttgagacaagcgtgggcaacagaacgagaccctgtgtctacaaaaacatttttaaaaattagcggggttcttgcttgagcccaggagttcaaggttgcagtgagccatgatcacgccactgcacgccaacctgggcaacagagcaagatcctgtttcaaaaaaataaaaaaataaatatatgaaatctatgaatgggtatgttttcttcttattattacttactatgtaattagcaatagtcagtcagctttcttagcaagagtcaaaattagaaacaacccgtgtcctttgtacaatagaatatatatatgtgtatatatatatacatacacacacacacacacacacacacacacacacacgtattttattgagagaggaaatacatactttaaggtatgtaaaaatcaataaatcttaagtatatgacttaatacatttttatccatgcaaccaacaatcaaataaaaatgtagaacatttccatccctccagaactgcactgtgtaatataaattaattaaaatgaaatcaccttaaaaatttttttgctcacgttagccttgaagttctcaataatggcctgtggctagttgctaccatattggacatatccatcaccacagaaagctttgtcagaaagcactgctactcacctatctcccatagggaaccactgtctgacctctatcaccatagattaattttgcctgctcttgagttttctataaataaaatcatacagtacatgcttatttcatctggtttcttttatctgacgtaatgacggtgagatgcattgatgtgatcgcctgtagcaatagcttgttccttttcattgttgtatagtattccattatgtgatgatatcacaatttgtttattgattgatcaacctattgaggacatttggttggttgccagtttttggatattgtgtataaagctgcaacttttgaaggactttttttttgttttttgtttttttgtttagttttgttttgagacagagtctcactccatcgcccaggctggagtgcagtggcatgatctcagctcactgaaacctctgcctcctgggagttcaagtgattctcctgcctcagcctcccaagtagctgggattacaggtgcccaccaccacacccagctaatttctgtagttttagtagagatggggtttcaccatgttggccagtctggtctcaaactcctgacctcaggtgatcttcctgcctcggcctcccaaagtgctgggattacagacatgagccaccgtgcccagccaggacacatgttttcatttctcttgggttgctgggttacagagtagatacaatgtttagcttcagtagatattgccaaatagttttacaaagagtatccccaccagcaatgagtgaaaattccagtttctccacgtccttgtcaacacttagtattgccagtctaaaaagaaaaattttagccattctcgtgggtggcaagattcagggttgaaagttgactgccaaccaccctgtactcctgtaccctgtcctccaggtctgcccaagatggaggtgtttcaggaatactacgggcttcctccaccccctggagccattggaccctttctacggctcaaccctggagacattgtggagctcacgaaggctgaggctgaacagaactggtgggaggtacaggctggggccacaagagtgatggggtgggacccaagtgtagggttatggattcatgtggtctcagggagttgggtcatagttccaccatgctctggaggtgatgcctggggagtggggtaggtagactgagacttctgggcatggcttttctgagcgggccatcttcccaggaagctaatactcattatcacctctctgggctctccaggccatcctgagatagatggacaagcagagtgaccattgagcagagagatggacacacacacacacacacacacacacacacacacacacacacacacgagtgatggggcaggatccacgtgtagggttatgggtttagatggcaggtggggttatggatcctataacctctctgttcctgtttttgtctcctgggtgtttagggcagaaatacatctactaatgaaattggctggtttccttgtaacagggtgaagccctatgtccatgtgagtgcctcaagtctgaatggaataagggcaaggggtccagggcgggtcctgggaggatggacagacttggaaagacacccccggagttggggagggggctgcccatcatggcaggtctttctctaactcaaggcttcacccaccccaccaactgagcccagagaggggccaccctggaaacaatgattgatctttttctccttgatcatttttgtgtaaaggtcctttccttcctacatgggtatggtagggaggaaggagcagggacctagaaggtgggcctgccccttgcttccttctgagacaccaaattgagttctgtgggagcactgtggcctccattgcctgtgtccttgccctgctcctggtggacacacctgtccactccagcctctgctgttcttccagtgttctctgcttgatggacccctcgctcttcatgatgacttcagatctctccctctctccccaacctcagacaccccctacctcattcacagcaaatgaccccactgtacacttcacagcctgcagagggaaattctctccagtgctggttttaactttatattatttcagacttctagcaaagctatgagaataatgcaaagagctcctgtgtagcctttacccagtttcatcagttctgttaatgttttgttccatttgctctgtcatttcctctctctacccacacatagtatttatttttcctggaagagttaaaagtgagtttgcagacgacgttcccctttacccctaaatacttcttaagagcaagagccttctcatgcataaccagagcaagatattaaaagacacaaaattcaacattgacattatactattatttaattcatagtctgtatttaaatgttgtcaatttccccaaaaattttatcaaaaatttttttgttcctatggtttctccactgtcaagttacaataggaatttccaaccccatcattctttccaaatttattagctggtgttctgctgcaagaaagagctgtcctttctgccctcatctgtctgtctgtctgtctatctatctatctatctatctatctatctatctatccatgcatccatcttttatctatatatcatctatctatttacctatcatctatttgcctatcacctatctacccatctattatctatctatatcatcatcatcatcatcaatcttttatctatttacctatcatctatccatctattcgtcatctacatattatctatctatctatctatctatctatctatctatctatatgtctatctatccatgtacctacccatcaatccatccattcatcaatcagttcttctatccatccatccatccatccatccatccatccatccatccatccatctatcatctatctacttatcaatacattcatgatctattcatccacctatcatttatctatgtatcatctgtctatgtattatctatcatctatctattcaccgatcatctctctgcctatttttcacctaccgatctaaccatctatcatctgtctattacctatttattatcatttctctctcatctattcatttatcatttatccatcacctgtctgtttatcatctatcatctttccatctatctattacctgtttatccatcatccatctattctatctatctatctcttaattttttgttttagagagagggtctcattctgtcacctaggctggagtgcaatggtgtgatttaactcactgcagccttgacctcctgggctcaagcaatcctcccacctcaccctcctgagtagctgggaccacagatgcaagccattatgctcagctttatttatttatttatttatttatttaagatggagtttcactcttgtttcccaggctggagtgcagtggggtgatctcggctcattgcaacctccgccttccggtttcaagcgattctcctgccttagcctcctgagtagctaggattacaggcgcctgccaccacatctggctaatttttgtatttttagtagagatggagtttcatcatgttggtcaggctggtctcgaactcctgaccttgtgatccgccagcttcagcctcccaaagtgttgggattacaggtgtgagccactgcacccagccgcagctgtttttttgtgtgtgattttttttttttttagagatagggtctcactatgttgtccaggctggtcttgaactcctgggctcaagcaatcctctcatagaacatccttctcttttttcttttaaaaaattgaggtgaaatttgcacagcataaaactgaccgttacaatgaaaaattcagaatactgagtagctgagattacaggcgtgcaccaccacacctggctaattttttgtatttttagtagagatgggattttaccatgttggtcaggctgatctcaaactcctgacctcaaatgatctgcctgcctcggcctcccaaagtgctgggattacaggcgtgagccaccacgcccggctgggtatggcattttcttttggagtgataaaaatgttttagaactaggtagaggcggtgattcctcattcattttattattattatttttgattatggcaaaatatatagaacataaaagttaacaatgtaaccttttttttggagacaggatctcactctgttgcccaggctggagtgcaatggtgcaatcttggcccaccgcagcctcgcctcccaggctcaggtggtcctcacacttccgcctcccaagtagctgggactacaggtgcataccaccatgcctggctaattttttgtatttttcgtagcgatggggttttgccatgttgcccaggctggtttcgaacttctgggcccaagtgattcccctgcctcagcctctcaaagtgctgggattacaggcctgagccgccatgcccggccaacataaccattttctaaggtacagttgagtggcattaagtacattcacagtgttttgccaccatcaccaccatcatctccagaacacttttcatcttgcagcactctgaacccattaaacagcaaccacctattcccctctcccagcccctgacattcacattctactcttgagctctatggatttttctgtcctaagtacctcacctaagtgaaatcatacagtatttgtcctttgtgtctagcttgtttcacttggcataatgtattcaaggctcatccatgttgtggaatgtgtcagaattttctttctttttttttttttttttggtgaaatggagtctcgctctgtcacccaagctggagagcagtggcgcaatcttggctcactgcaagctccacttcccgggttcacaccattctcctgcctcagcctcccgagtagctgggactacaggcacttgccaccacgcctggctaattttttgtatttttagtagagtttcaccgtgttagccaggatggtctcgatctcctgaccttgtgttcctcccgcttcggcttcccaaagtgctgggattacaggcgtgagccactgcgcccggcctttttttatttttatttttttgggatggagtgtggtcctgttacccaggctggagtgcagtggtcgtgtaattataactcactgcagactcgaccccctaagcttaagtgatcctcccacttcagcctcctgagtagctgggactacaggcatgtgccaccatgcctggctaatttttctacttttaaaaaaatttttgagatggagtttcgctcttgttgcccaggctggagtggaatggtgcaatctcggcccactgcaacctcagcctcccgggttcaagtgattctcccacttcagcctcgagtagctgggattacaggcatgcaccaccacaccaagctaatttttgtatttttagtagagacagggtttcaccatgttggccaggctggtctcgaactcctgacctgaggtgatctgcccgcgttggcctcccaaagtgctgggagtacaggtgtgagccaccatgccgggcctaatttttgtattcttttgtagggacagggtttcatcatgttgcccaggctggtctcgaactcctgggctcaagagacccaccctccttggcttcccaaagtgctaggattacaggcatgagccaccgtgctgggcaattttcttaattcttaaggctaatattccatggtatgcatataccatgttttgtttatccgttttcctgtcaatgaacaattggttgcttcaacttttgcgtattgtgaataaagctgctacaaacatgggtatgcaaatatcatttcgaatccatgctttcaattcctttgggtatatactcagaaacaggacggctgggtcatatggtagtgtagttctagtttttaatgttttgaggaaccaccatactatttttcttttctttttttttttttttgatagggagttttgctctgtccccaggctggagtgcaatggaatgatctcggctcactgcaacctccgcttcccaggttcaagcaattctcctgcctcagccttccaaataactgggattacaggcatgcgtcaccacgcccggctaattttttgtatttttagtagagacggggttttgccatgttggtcaggctggtcttgaactcctgacctcgtgatccgcctgcctcggcctcccaaagtgctgggattacaggcatgagccaccgtgtccagcacatactgtttttcatagtgcaccattttccattcccaccaacagtgcacaagggttctgatttctccacatccttgccaacatttgctactttctgttttgtttgttgatttgtttttgccttatagtagctgtcctaattgttttaaggtagtgaaagtgagcactttcggccgggcgcggtggttcacgcctgtaatcccaacactttgggaggccgaggcgggtggatcacctgagctcgggagtttgagaccagcccgaccaacatggaagaaaccccatctctactaaaaatacaaaattagccgggcgtggtgacacacacctgtaatcccagctacctgtaatcccagctgaggcaggagaatcgctggaacctgggaggcggaggttgctgtgagccaagatcgcgccattgcactccagcctgggcaataagagcaaaactctgtctcaaaaagaacaaataaataaataataaatacatacataaaacaaaaaagaaagtgagcactttcatccatatttagatgagggttggtaaactttttctgtaaagagccgaagagtagtgtaaatctgctcaccctccagggtcccatatggttttgcaactcttcagctccgcccctgtagtgcaaaagtagccacagataatctgtaaatgatgtatagacacggctgtgttcctacaaagcataattcatgggcactgacaggtgaatttcatatgatcttcacaatcccaaaaacattcttttggctaggcgtggtggctcatgcttgtaatcccagacctttgggaggacaaggcaggaggattgcttgaggtcaggagtttgagaccagcctgggaaacaaagggagaccatcccccgcccgatcttgacaaaatttaaaaaaattaaaaattagcgggtgtggtggtgcgtacctgtagtcccagcacttgggaggctgaggtgagaggatcgcttgaacctgggagatcgaggctgcagtgagctatgatcatactgctgcactccaacctgggcagcatagtgagactctgtccctaaaaaaaagaaaaaattcttttgatttttgccaaccatctaaaaatgtaaaaaccattcttgacttgagggtaatgataaactgctgggaagacaacccctgctttatatgatactggggcagtctctcccccgaggttctgggactttatccccagtgagtaccacagtgcctggcacataataggcactcactaaatgcaagtggaatgagtgaatgaatgaatgaatgaagtgccctgccctctgctgtcaagctggggtctttacactaagttggggtctctctctgtattcttagggccctcctcaggacctgtctgttcatctctggtgagtagaaacatttatttttgtttcaatgagaggtttctgggttggggttccaggctgggtatgggaggaacctccgagccaattagttatgcattctgtgatccctgagcaccgacttctgaatctagctctgggctgggggctgctggggatgggacagacaaaggagggtccctcaccttgggagatgatggtcttgttggaaggaaaatggttacaatgatgatgacgatgatgacaatgatgatgatgataatgatgatggtggtgatggtaatgacagttccagttgtttttgtaggattttttgttttgtttgtttgtttgttttgcacctatagcatgtcaagcatataggggtggaggtttacagtgtggcttttggagcccgctgacctggattcaaattctgaccccaaccttacctagctgtatgaccttgggccggttacttaacctccctctgtttcagcattcctctctggaaaatagcttaatgacagtatctacttcatagtgtttttaggaggcgtaaatgagtctgtcaagtgcttagtcctggtcctgacacataatgaggactttatacagcattagctgttgttattactcatttaatctgttctaagatgcatggttgttttttttttcttcttcacatttgaacatctctgacattgaaatagctcttgcgatccacagtgtccatcttctgctgaattttataggcaggaagtgttctttcataatggcacataaaagaatggggcattgaacaattgctggcgcatcagctatttaatgagctcctttaatcttcacaaaagcccttcggaaaatagatttgattcttactctctgcccccatactttcttcttttcttcttcttcttctttttttttttttttttttttttttttttttttttttttttgcaaatgaggctgagagagggtaagtgaattacttaatgtcacatggtgaggaagtgatggagatgggatttgaacccaaagcctcagtgcctcagtttatcatctctggctagtaataaaacacagcatgatgatgctcccatcttcttgttgcccaggctggagcgcaatggcgtgatctcggctcactgcaacctccacctcccaggttcaagcgattctcctgcctcagcctcccgagctgggattacaggcacctgccgccacacctggctaattttttatattttcagtaaagacagagtttcaccatgttggccaggctggtctcgaactcctgatctcaggtgatccactcgcctcagcctcccaaagtgctgggattacaggtgtgagccacctcgcccagccgacgctcccatcttctaagtgtgtaccacatagtagcaggtgcactattgccatttataaaaaatgtgcatctgtggcgtctccctcttttcagaagaggaaattgaggcccagagaggcaaaaccagttgccgaggtcttagaacacgtaagaggcagggtcaggatttgaatcgtgctctcctgcgttagcgctccttccgcccttctgcgccgagatgtggtcaatggggtggggaccagggtgagaccagggaggctctctcgtgggtgcaagatttaaggggacgctgaaaatctcagtcattaaggtccatcatgttttaatgcaacattaaaaaaaatcaaaaacaagccaaaaaaatttcgagatgaacaaataccaaaactgtaactaaagacaggatccaatagagctgggagtaagaggaggtgggtgaggtgagtcgggcagtcagattctgtctttattcaaaatgttgatgtttgttcatcatggtttctttgcattcattaaaaaaagatgttaaacaccaactcgaaccagatttgcattcgttttttaaaattgaggtgaaattcggctgggcgcagtggctcacgcctgtaatctcagctctttgggaggccgaggcgggtcgatcacttgaggtcaggagttcaagaccagcctgggcaacatggtgaaaccctgtctctactaaaaatacaaaaaaaaattagctgggcatggtggcgcacgcctgtagtcccagctactcaggaggctgaggcaggggaatcgcttgaacctggcaggcggaggttgcagtgagccgagattgcgccattgcactccagcctgggcaacagagcgagactcggtctcaaaaaataaacaaacaaacaaataaataaataaataaaaatgaggtgaaattcatacaacataaaattaaccttgtaattgttactggcatttctatttctattcatatttacatttatattacatattaacatttacatgatgttagatattatatgcaattacatatgatttataattaatacttatcatttatattgtgtatttatgtttacaacctattatatattataccacatatcataaaatatatttatattatgctatgtattttcacaaattaatgttttttatttatgttgcacatttatgtttatattatattataccatacacaatatattataataagatttataggttacctatttactttacattatattatatttatctacaattatgtataatatataactaatatttattctttaaattgtatatttacatttatatcatcttatcacatattataccatatatcatagtatatttatattacagatttgcatttatattatgctacatattctagagaattaacatttattatttatattgcacatttatgtttatatatcatatgcgttatataatatactatactgtagctttatatattacatatttacatttacattatgttaggtgacataaaattatatattatgtataattaatatttattatttatatatgttacatttatgtcatattgtacgttatgtattttaacatacatttacattaacatgatgtatttacacttatataaaattatatattatgtataattatgtattacacataattaatattctttattgtatgttacatttaaatcatgttgtacattatatactataatatacattacattaacaagagatatttacgcttatataaaattatgtattatgggctgggcacggtggcttatgcctgtaatcccagcactttgagaggctgaggcgggtggatcacttgaggtcaggagttcgagaccagtttggcctacatggtgaaaccccgcctctattaaaagtacagaaaattagctgggcgtggtggtgtgcacctgtaatcccagctactccagaggctgaggcaggagaattgcttgaacccaggaggcagaggttgcagtgagccaagacagagcgaggcactgtctcaaaaaaaattatatattatatataattatgtattacatataattagtatgtattatttatgttgcccatttacatttataatatattgtatgttataccatatattatacatttacatagactatatatggtgtattccatgtaatataaatattacatgtatatttatattatattcatattatatattatagggttatatataactatctatattaacatatagctatctacaatagatagttatatattattatataatgattatatattattatatataactattatttatattgaatatttacactcacattataaatatattcatgttatatttatattcagtggctttttgtttttttttttttggagacagagtttcgcactgttgcctgggctggagtgcagtggtgtgatctcagctcactgcaacctccgcctaccgagttcaagcgattctcttgcctcagcctcctgaatagctgggattacaggcgcccgccatcaagcccagctaatttttgcatttttagtagagacgaggtttcaccatgttgcccaggctggtctcgaactcctgaccttgtgattcgcccacctcggcctcccaaagtgctgggattacaggcgtgagccacagcgcccagccagtgccatttggtatatttgcaatactgcgccgccatcactgccgtttagctccaaaacattctcagcacccccaagagaaaccccatcccgggcagttgctcctgcctcccgcagcccccgggaaccaagggtctccttcctgtctctgtggattggcgtgttctgggcatttcctatgaatggaaatcacacagtgtgtggccgtttgtgcctggcttctctcactgagtgtgatgttttaaggctcatctccattgtagcccatgtcagtgctgcttcccttttgatggctgactttattcattttgatttctaagaatattgtattagaatactgtttgttttacttattgtcatttaccttgatgactaggttttttggctctcacttacattttgcacctgaggctcgtgactcattctccttcccctacttctgtccgggtgaccacagagatgggcacacagtgagccttcaggaaatgcctggtgaagccatcgccaaattccagacacccagccagacccaaagggctgagccatccccccgaatccatgtgtcaaaccttagtggtgacctgtagaagtggaagcccgctccccatgtctgggctccggcccctgcctccacggggcctaccttggtgctgaagggctgttagagccaggctgtcaccaacttaaaaaatcaaaggggttcagggggaaaggcaacctccatatggcaatatggggacccaggcacggggaccgtgccacctctgtccttggtgtctctttgcaggtacgcaggccccatggagcgggcaggggcagagagcatcctggccaaccgctcggacgggactttcttggtgcggcagagggtgaaggatgcagcagaatttgccatcagcattaagtaactcctttctccctgactcatacccttttggggcctgggccctgcgggcctgggaaaaagggtatccaggttttactttatagaagtgtacggtaatagcatccaccttttactgagcccctgctggttcccacgtgcctttcaccttctttatttcttttaattgacgaccacaagaaagagatatgattcctatagaggctcaaaaaggctcttaaaattaattaattaatttgagtcagagtctccctctgtcgccctgacctttcttttttcccctttttttcttttcttttcttttctttttttttctgacagagtccctttgtcgcccaggctggagtgcagtggtgagatctcagctcactgcaacctcccaggttcaagcgattctcctgcctcagacccccgagtagctgggattacaggcgcctgtgaccatgcccagctaatttttgtatttttagtagatacggggtttctccatgttggccagcctggtctcgaactcctgacctcaagtgatccacccgcctcggcctcccaaagtgttgggattacaggcgtgagccatcgtgcctggcctgaaggcttttatttttaaccaattttcatatatatgttttttctttttttttaacttccaggaatttctaatttttttaatttaattttattattattattgttattttggtgacagtctgtctctgttgcccaggctggagtgcagtggtgagatcttagctcactgcaacctctgcctcccagattcaggggaccctcctagctcagcctccccagtggctgggactataggtgtgcaccaccacatccagctaatgtttatattttttgtagagacgagggtctctccttgttgcccaggctggtctcatactcctgaccttcaaacatcctcccacctcagcctcccaaagtgcaggtgtgagccactacatcccacctatatattttttttttcaacttattttagaatcagagggcacatgtgcaggtttgttacaaaggtatattgcacaatgctgagggttggggccatgaatgatcccaacacccagggagtgatcatatactcggtagtttttcagctctttcatcccaccctcctccctctagtgctcccccgagtctactgtttccagcctttttttttttttttttttttgagatggagtctcactttgccgcccaggctggagtgcaatggcatgatctcagctcactgcaaactccacctcccaggttcaagcgagtcttctgcctcagcctcttgagtagctgggatttacaggtgcacgtcaccatgcctggctaatttttttgtatttttagtagagacagtggggtggggggtggggggaaagtttcaccatgttggccaggctggtctcgaactcctgacctcaggtgatccacctgcctcggcctctcaaagtgctgggattacaggcgtgagccactgtgcctggccaatattattcccatctttatgtccatgtgtacccaatgtttaacccctgcttataagtgagaacatgtggtgtttggcttactgtttctgtattaattcatttaggataataacacccagtgcatccacgctgctgcaatgcacatgatctcattcttctttatggctgtatagtagtccatagtgtgtgtatatgtaccacattttcttatccagtccactgttgatgggcacctgggtcgatccatgtctttgctattgtgaatgctgctgtgatgaacaaacaagggtgtgtgtctttctggtagcacaattactttttcctttgggtagatacccagtcatagggtagctgcatcaaatggtggttctatttttagttcttcgagaaacctccaaactgctttccgcagtggctgaaccaatttacagtccagcccacagtgtagaggaattcccttctctcacatgctgctgagtttgtaatttcattgttatttttggctcctgtgaatttcccttactttttttttttttgagagctcagcaatttttttctcaacatttctagtgtttttttaaataggaagagttttgtttgtttgtttctttgttttttttttttttttttttgtgatctagtttgccagatgagcaggagtggaggtcttctccaaggccccttttagtctatttccaccatgttgacagaaatgggtctttcctccctcttcctttatatcctatggttgtctatattggtggaaggggaggtctcttcgtatccattctagaacactgccttctttacaagatcttactgacttctcaacaaacctgtgagtcagggaagatgattcctcttctacgagaggaagacattaaggctttagagtagcaaaggccccagggaatgggctctgttgggacagcttgtctttggtttccagtagttactcctccctgaaggggtcaaggttgcttcctccataactggggcttggtggggaatgggcctggtccccagactcagggcccggtgaccatctggttccagatataacgtcgaggtcaagcacattaaaatcatgacagcagaaggactgtaccggatcacagagaaaaaggctttccgggggcttacggtaagggtcaatgtccgctcaatcccagctttccagaacctaggaggaccctccctgcacctccgccttgggacccccttttcccacattcagggtgacccccctccagtggcactacagtgcaagtgaccttaaacttatgctcttaatgatgaacaatgggaataataatgaataacagcagttgaatattgacagagcacttaagtgtaagatatgttcatttttaaattttatttatacatatattcaagcattatgtatatatgtatgtgtgtatatatgcatatatacatacatatgtatgtatgtgtatttaaattttacttacgtatatatacatatgtatacatatgtatgtagggtacatgtatatacgtgtatctgtttatttttatatatatagatagatagagagagagagattgagagagagaaagagagtcttgctctgttgcccaggctggagtgcagtggtgcaatcatagtacactgcagcctcaaattcctggtttaaataatctctcgcctcagcctcccgagcagctggtactataggcatgcaccatcatgcctggctaattttaaaaaaaaattttttttttgtagagatggggacttgctttgttgctcaggctggccttgaactcctgggctcaaataatccttctgtcttggcctcccaaagtgttgggattacaggtgtgagctactgcattcagccctcaaatatgttatagatagaaacctaattaatcccctcaaccttctttctgagttcccatttcacagatgggtaaaactgaggtttactcctcgtctagcttcactgaatggcagagcccatagcttgtctttgcctaatctgctgcataatcatttcagcaacaactcaaatgccttttgagggttcttgcttctgtttggtgccttgtaattttcaaccatattttagacactttaggcctaatgatctaaggcatatggtttttacccatggtctgtgggcccttgagaagctgagtcctctgaaagaaaatcagaatgttgcatgcatctgtattttttgtcttagatttcacttgattctcaaatggatccttgactcccccaaagtttaatttattcaacaaatcttttttttcctccatactttttattctgaaacatattcccccaatttttaacttctgaaaaatttcagacaagttattggaatagggtagtgagtatctatgaacctttcatataggtttactttaaaaaaaatacaagagacagggtcttgctctgtggcccaggctagagtgcaatgttgtgatcatagctcactgtggcttcaaacccctgggctcaggcgatcctccctcctcagcctcctgaatagctgagactacaggcatgcactgtcatgcctggctaattgtttaaatcttttttagagatgggatcttgctatgttgcccaggctggtcttgaactcttggcttcaagtgaacttcccaccttgacttcccaaggtgctgagattccaggcatgagccactacatctggcctgatgatgattgctaattgtaaattaaggcatgtggccccatagaaggttttgaatttggtgagctaattatctggtaaatttatcacgaagtaagttagtccactattgaaagaacctgtttttggccgggcacggtggctcacgcctgtaatcccagcactttgggaggccgaggcaggcggatcacgaggtcaggagatcgagaccatcctggctaacacggtgaaaccccgtctctactaaaaatataaaaaattagctgggcgtagtggcgggcgcctgtagtcccagctactcgggaggctgaggcaggagaatggcatgaaccctggaggcggagcttgcagtgagccgagattgcgccactgcactccagcctgggcgacagagccagactccgtctcaaagaaaaaaaaaaaagaaagaaagaacctgttttaggcagtgtggtcccttccccataaatagtcctggctgctcagggaggtgatgaactccccatcatggggagtattcaaggggtcactttccaaagaggccagaaacagggcctgcttcatgtgaggagttgcatatggctgttcctagctctgcccccttatgggctggcccgctgggatagcatctgccatgtggtccgccttctaggagctggtggagttttaccagcagaactctctaaaggattgcttcaagtctctggacaccaccttgcagttccccttcaaggagcctgaaaagagaaccatcagcaggccagcaggtaggaggtctcagactgggggcttacagcctcagccccttcccattgtggagggaaactttggggatgccattgacaccccttccaatggccttgcagaggtcatatctgtgcagtagcaggaacccctttccactcctgtctatcccttcctatatatattttaatataatataatttaattaattaatttatttattttttgagacagagtctcactctgttgcctaagctggagtgcagtggtgcgatcttagctccctgcaacctttgcctcccacctcttgggttcgagggattctcatgcctcagcctcaaaataaaaaaataaaaataaaaattccaaaccagtcttattttctggctgggtgcggtggctcatgcctgtaactccagcacttcgggaggccaaggtgggtggatcacttgaggttaggagttcaagaccagcctggccaacatggtgaaactccatctctactaaaaaaaaaaaacataaaaatcagccgggcatggtggcacaggcctgtaatccccgtgattcaggaggctgaggcaggagaatcacttgaacccaggaggcataggttgcagtgagctgagattgtgccaccgcactccagtctgggtgacagagagagactttatctcaaaaaaaaaaaaaagtgttattttctaaattcagacgggaggatgatgctgggagtacaattgtgtccccttacagtacagggcatctaatactctgcagaaaagagcactgaggagccctttatcctggagttactgtcctgagagcttgtgcccccagagagtgagtgggtatctgccccagacccttttctcacttctgttctctctccacagtgggaagcacaaagtattttggcacagccaaagcccgctatgacttctgcgcccgagaccgatcagagctgtcgctcaaggagggtgacatcatcaagatccttaacaagaagggacagcaaggctggtggcgaggggagatctatggccgggtgaggcaggcagggctgggtgacggggagggcatgggggttgagctggtggtggacgagactggaactggggactggagaaggtgaggtgcggctcccatggagatctctcacggtgggagggaaggaagggacacagggatgtcatttatgcatttatgcaacctacctgcatgtattcagcacctgctgtgtgcagacattgtgctgggtgtcgaggagacagaaacaagcacggtacaaggattgccctcatgaaacttataatcgaatgtggaggacagacctataaccaagcagtcatgacactgagtggtcaagactaacaagggtgccagtcacggtggctcatgcctgtaatcccagtgctttgggaggctgaggtgggaggatctcttgaggccacaaattcaaggcaagcctggctaaaatagtgagatcccacctctacataaataaaaataaaaacaaaaacattagttgggcgtggtagtgtgtcccaggtactcaggaagctgaggtgggaggattgcttgagtccaggagttggatgctgcagtgagctatgattgtgccactgcagcctgggtgacagaacaagaccctgtctttaaaaaaaagaagaaagaataaaagagattgtggtggagaatcacagggcagcgtgggagcactgagggagcccctgacccaccctaggagtggatcaggatgacttctgaaaggccaaactgattaataagggataaataaagtcatgcaaatgaaaaggttgtatatgtgttgggggaaagcattccagacagaaggaccagtgtgtgcaaaggccctggggtgagaggtgcctaatcagtactgaatatacaaagaggtagagctgggactaaaccactgtgctcactttgcctgcttgaattccgattccaaggagtggaatagacttcaaatgtcttcaagtccacttgtttctgccaagttctcatttttgttccatgaaggcagagcaccttctttatttcatccactgatgacttctcagcctctagaattctgccttatgatggatttctcagaaatatgtttgtgtaatgaagacaaggacagtggttagagtttacattctactggggaaaatatacacaaaaaatgatgtggataattgcatcgatgaggagttttgttaaaacattggagggtcagtttaatgagcagtggaggacaattaggctttgagagaggcttttggagcattgaggaaggattgggatgtaaaggattcatccatccatccatccatccatctatccatccatccatctatccatctatctatccacaaatcatccattcatctgtgcatccatccatcttagcctatgcatccatccatttcaacctacgcatctatccattcatccacccacccttccactcacgcatctatctaaccatctatccacctacccacccattaaaacattaatctatccattaatccaccatccagccaacatctattcatccatttctatctgtgcatccatccatctatccatgcatgcacccatctgttaatctatctctatatttatccatccatacacctactcaccagtccattaattcatccatccatccatccgaccaccatccactcacccttccaatcaccattcaccaacccaagtatccatccacccattcatctatctatctatctatctatctatctatctatctatctatccattcattatctatctacctatctatccacctacccatcaatccaataatccatccattcatctatccatccagccaaaaaatattcagtaagtatctactgtgtgccaggaactgttctaggctcttgggattcagtgacaaataatacagacaaaaatccctgctggccaggcgtggtggcttatgcctgtaatcccagcactttgggatgccaaggtgggtggatcagttgaggagaggagtttgagacccgcctggccaacatggcgaaaccctgtcttaactaaagatacaaaaaaattagctgggcattgtggcgtgcgcctctaatcccaggtactcgttaagctgaggcaggagaatcgcttgaacccaggaggcggaggctgtggtgagctgagatcgcgccactgcactccagcctgggcaacagagtaagactgtgtctcaaaaaaaaaaaaaattctgccttgtagagctcacattgcagttgcagggaggggaacagacaaaaagcttgtaaataagcaaatgatacataatgaatcagacggtgatatgtgctatagaaaaagataaagcaagacaaggggtccaggcacggtggctcatgcctgtaatcccagcactctgggaggccgagatgggcagatcaccggaggtcaggagtttgaaaccagcccggccaacatggtgaaaccccgtctctactaaaaatacaaaaaaattagccgggtgtggtggcaggcgcctgtaatcccagctactcgggatgctgaggcaggagaatcacttgaacccgggaggtggaggttgcaataagctgagattgcgccattgcactccagcctagggggcagagtgagactctgtctcaaaaaagaaaaaaaaaaaaaaaagaaaagaaaagaaaaagaaaaggggctaaggagtgttggggtgggtggagcttgcaattttgaatagtatggctaggaaggtcttgctgataaagtgccatttagggagggacttttaggaggtaatgggtgtgtgtgtgtgtgtgtgtggtcagccttgtgtacgttgggtgatgtgttttctgggatagacagaaggaagagcaggtgcaaaggccctgaggtgggagggagcctgcctggtgtgtggaggggcagtaggaggatgtgcagaggttgcactgatgaactcctcgtctgtttccaggttggctggttccctgccaactacgtggaggaagattattctgaatactgctgagccctggtgccttggcagagagacgagaaactccaggctctgagcccggcgtgggcaggcagcggagccaggggctgtgacagctcccggcgggtggagactttgggatggactggaggaggccagcgtccagctggcggtgctcccgggatgtgccctgacatggttaatttataacaccccgatttcctcttgggtcccctcaagcagacggggctcaagggggttacatttaataaaaggatgaagatggatagaaggactggtgtcgttcagaaggacctgctaggagagagatggggagagagtgtgccacactgacaaagccccctcaccaatccacagacaaagcccccttaccaaccacagacaaagccccctcaacaatccacagacaaagccccctcaacaatccacagacaaagccccctcaccaatcacagacaaagcccctcaccaatccacagacaaagccctctcaccaatttctgtctcctaacttgattgctgttctctgtcatctattaatacaatacaacttgaatctgggatatgaaattccctcttttgggctgggcatggtggctcatgcctgtaatcccagcactttgggaggctgaggtgggcagattacctgaggtcaggagttcaagaccagcctggccaacatggcaaaaccccgtctctactaaaaatacaaaaactagccagtgcctataatcccaactactcaggaggctgaggcagaagaatcccttgaacctgggaggcggaggttgcagtgagccaagatcgcaccactgcactccagcctgggcaacagagcgagattccgtctcaaaaataaataaataaataaaataaaataaagcaggaatttgctgggtgcagtagctcacgcttgtaatcccaacacttcaggagattgaagcgggtggatcacccgaggtcaggagttcaagaccagcctggccaacatggtgaaaccccgtctctactaaaaatacaaaaactagccgggcgtggtggcaggtgccagtaatcccagctgcttgggaggctgaggcaggagaatcgcttgaacccaggaggcagaggttactgtcagccgagatcatgacgctgtactccagcctgggtgacagagcaagaactctgtctcaaaaaataaaaataaataaagaaataaataaataaaagtgagaatttcttttcttttttttttttagtactcaaagatttttatactcaggaaagaattttatactcaaagattcaagatcacaaaaatgtaccgctcattcgtttttctttctttttaaattattttattttattttttcagggacagagtcttactctgttgcccagccgggggcacagtggcacgatcatagctcactgcagcctccacctcctggtgtcaagcgatcctcccacgtcagcctcccaagtagctgggactaaaagcaagcaccaccacacccggctaatattttattttttgtagggagggggtgttgctatgttggtcaggctggtcttgatctcatgggctcaagcagtcctctcaccttggcctcccaaagtgctgggattacaggtgtgagccactgcacctggcctcatttgtttttctttttgagacagagtcttgctctgttgcctgggctagagtgcagtggtgcaatcttggcttactgcaacctccgccccccaggttcaagtgattttcctgccttagtctcccgagtagctgggactacaggcacgcgccaccatgcccagctaattttttgtatttttagaagagacagggtttcaccatgttggccaggctggtctggaactcctgacctcaggtgatccacccgcctcggcctcccaaagtgctgggattacaggcgtgagccacctcacctggccattttttatttaatagtctttattaattattaaaattgcagtaaaatatacattacatgaaatttattttcttaagctttttttttttcttttttttttgagacggtgtcttgctctgtcacccaggctggagtgcagtggtgcggtctcagctcactgcaagctctgcctcctgggttcacgccattctcctgcttcagcctcccgagtagctgggactacaggcgcctgccaccacacccggctaattttttgtatttttagtagagacggggttttgccttgttagccaggatggtctcgatctcctgacctcgtgatgcacccgcctcggcctcccaaagtgctgggattacaggtatgagccaccacgcctggcattttttttttttttttttttgagatggtgtcttgctctgtcacccaggctggagtacagtggcgcaatctcggctcactgaaacctccgcctcctgggttcaagtgattctcctacctcagcctcccaagtagctgggattacaggcacccgccaccacacccggctcatttttgtagttttagtagaaacggggtttccccatgttggccaagatggtctcgatcttctgaccttgtgatcgaccagcctcggcctcccaaagtgctgggattataggcgtgagccactgcgcccagcccttagacttttaatgctcataaactaagattcaggatctccaaggaagattttgaagttcaaaagccagggaggctgagggcagaggattgcttcaggccaggagctcgagaccagcctgcacaaaatagtaagatcttcctctctacaaaaaaaaaaaataaataaaaaaataaaaaaaataaaaaaattagctctgcatggtggcacacaactgtagtcccagctactcaggaggctgaggtgggaggattgcttgagcccaggaggtggaggctgtggtgaactatgattgcaccactgcactccagcctaggcaacagagtgagacctcatctctaaaaaccaaccaggccagtcacagtggctcacgcctataatcccagcactttgggaggccgaggcgggcagatcacttgaggtcaggagtttgagaccagcctggccaacatggtgaaatctcatctctactaaaaatacaaaaattagccgggcgtggtggcaggtacctgtaatcccagctacttgggaggctgagataagagaatcacttgaacctgggagggggacgttgcagtgagatgagactgcaccgctgcactccagcctgggtgacagagcaaaactccatctcaaacaaaaacaaaaacaaagaacaaaaaacaaaacaaagcaaagaaacaaccaagtaaccaactgaccaacaaaagccagggagttgctttttgggtaaatctgcaggctgctagcataacccttaggaggcaaaaagatgggctggcctaagctgacagggctggggaaggatcatgggctataaattaatttgggaaaaagtagttcatacttccaaatatattaccctaccatactactaacagaggcacctcccgtgtcaagtattcagtgttgtctggcgccatgaaagtaagcacttcctacacagtatctagattaatctcacagccagcttcgtggtattttatcttattttattatttattaatttatttttgagatggagtctagctctgtcgccaggctgcagtgcagtggtgcaatcttggctcactgcaacctccacctcccaagttcaagcgattctcctgcctcagcctcccgagtagctgggattacagacacacgccgccacacccagctaacagttgtatttttagtagagacacaggggtttcgccatgttggccaggatggtctcgatcttctgacctcgtgatctgcccacctcagcctcccagagtgctgggattacaggcgtgagccaactgcaaccggccgggtttctttttgttgttgttgttttttttgtttttgagacggagccttgctctgtcgcccaggctggagggcagtggcgcgatctcggctcactgcaagctccgcctcccgggttcacgccattctcctgcctcagcctctcgagtagctgggactacaggtgcccgccaccacgcccggctaattttttgcatttttagtagagatggggtttcatcgtgttagtcaggatggtcttgatctcctcgccttgtgatccgcccgcctcggcctcccaaagtgctgggattacagacgtgagccactgggcctggccagtttttatttttatatgaaatagagcatagtggtcagggctccaagagattctaaggtcctctgtgcccctgtgaaattagctataaagttttgggaaagacttcgcctctctgaaccagagaaagataaaatcagctcgccacaggcagagagtcggtatgcacctaagcacagaaccacgctcttaaccgtcactctagtgccgggtggggatcttggtatatcctagctctctctgcaaccccaggtaagccaacgcctagatggtacctgcacacacctggccaggtgcaggatatagcctctgaagcctggagtgaagtgtttttcatgtttgaggaaccatgaatctagaaatgggtgttggaggaagcaatgcagtcacaagggatcaggaactaggacggggggtttctgcccctcccgtgactcccccagagtcacaccatgaacctacctatggcctaaggtggctacctgggctgtctagttcagggtgttggtgaggttgaggtcatggacttgttcttggagttcctgggtggccctcaccttcagccccaggctgtgtgaatgactcaggcgcagacctgcctgaaaagcacgtataatccagtaggggacttaacaatcaaccaggcaattataacacagagttgatgaatttcataaggaacacaggtggctgtgggagcaaatacagatctaacccaggcttgagtaggggaggatggtcagggagggcttcctggaggaggaaacatctaaggtggcaactgtataatcagctggatggagtcacctagaaaataaatgaggggacagcctagcacggtggtccatgtctgtaatcccggcacttggggaggccgaggcggcggatcacttgaggtcaggagttcgagaccagactgggcaacatggtgaaacccccatctctactaaaaatacaaaaattagccggtgtggtggcaggtgcctgtaatcccagctactcgggaggctgaggtaggagaatcacttgaacctgggaggcagagattgcagtgagctgagattgcaccactgcaccccagcctggacgacagagtgagactcaataataataataataaataatgaagggaaagttttttagggagaggggcaaatgatagtgatcctggtaggttctggaaacttcaaggggctcattttgcttggagagggaggaaagtgggggtggggtgggtgaaaagttgttgggagaccgggcgtggtggctcatgcctataatcctagcactttgggaggccgaggcaggtggatcacttgagctcaggagttcgaaaccagcctggccaacatggtgaatgtacaacggacagcccccaatacagacagacagacacacacacacacacacacacacactcactcactcctacccccagccctaagaatttacaaacactgataaagacaaatgaaatcagcggatatagacttcaaacgccgtcagacagacacccactagatcaaacagggacattcctaaacatcacacagacacatcgccaggcagtcccaccgcagacagccacaaattaaagccgcgcttgccccctgatggacagcagcagtagtgcgccacctcgatagcgcaatctcccagagcgctggcattgcaggcgtgagccaacgtccgcagccaaacacgttcatattgttgagaaggcagagaaatacaaagtaggtggaagggtctccacctacagctgttttctgtggtctgaggattcttcccacgtctttaatttctagtgctttctaggggtctcaacttgaactatttaatattttctggaagagaaacattttttgtggggggggcgggtgggggtgggaccgagtctcgctcttgtctcccaggctggagcacagtggcgcgatcttggctcactgcaacctccgcctcccaggttcaagcgattttcctgcctcagcctcccgagtagctgagattacagcgcccagctaatttttgtatttttagtagagatggggtttcaccatgttggccaggctggtctcgaactcctaacctcaggtgattcgcccgcgtcggcttcccaaagtgctgggattacaggcgtgagccaccgcgcccggcccagaggaactttttttttttttttccagaggaacattttttatccaaaggaatgactccctaatggtggaattccaggcaatgaagtgaggcgcgaggcagattgtcacatagggagctgtcatatttcatgggtaccattcacgcaaggcgggacttgttcttaggcagccaacacttccgcattgtcctggcatttgagccgcggaaccaagttccgcgtatcttgcccattgtaaccccacagcaccaatttgaagctatgtagtgccctctggtggccttcggtgatttggcttcagtgtctcaaactctctgattagactgtttccaaagagaaggctgttagggggcctcagaagtcaggtttggatgtttgagctctaagctgcaggatttggggagccgtggtgtgggggtgatttatttatttatttttgagaaagagtctcactctgtcgcccaggctggagggcaatggtgtgatcttggctcactgcaacctccacctcccaggttcaagtgattctcctccctcagcctcccgagtagctgggactacaagagcccgacaccacgcccagctaatttttgtattttcttttgagtagagacggggtttcaccatgttggccaggctggtctcgaactcctgacctcaggttatccacctgccttggctttccaaagtgctgggattacaggtgtgaaccatgcctggccggagtggggatgattcaaacagtggatattcgcatagaatgtgcccattcctatggtgtaaatagtcccaccgcatctgatttcttttttcttcttttttttttgttttttgtttttttgtttttgagatagagtcttgctctgttgcccaggctggaatgcagtggcacaatctcagctcactgcaacctccacctcctgggttccaagcagttctccctgcctccgctgcctgagtagctcgattacaagtgcccaccaccaagcccagctaacttttgtatttttagtagagatggggtttggctgtttgccaggctggtcttgaactcccgacctcagatgatttgcccgcctcggcctcttacagtgctgggattacaggtgtgggccaccgcacctggcccacagctgatttcaagtcatcataagtatcctcactttccttgcctccagtccacccagcaaaagcacaactaacatcagagagctcaggcacggggataaccataaggtcctatgtaatctgcatctcccttcctgccttggccatgctggccacaggcagcaggaaggggcagaggaaggagctgggcgaggatgtggcctcagctggagtttacttagagattagctccatggagaaaaataaagtggagtaacatgctagcaagtttttatttaaaactttaaaaataaaaaagtttttgaggccgggcatggtggctaatgcctgtaatcccagcactccgggaggccgaggcaggcggatcacaagggcaggagatcgagaccatcctggctaacacggtgaaaccccgtctctactaaaaatataaaaaattagccggacatggtggcaggcgcctatagtcccaactattcgggcagctgaggcaggagaatggcgtgaacccgggaggcggagcttgcagtgagccgagatcgcaccactgcactccagcctgggcattacagtgagactgtctcaaaaaaaaaaaaaaaaaaagaaaagtaaaaaaagaacagaatgctttggcatatttaaaaatggttcctgccgggcacagtggctcatgcctgtaatcccagcactttgggaggctgaggcgggtggattacgaggtcaggagatcgagaccatcctggctaacacggagaaaccccgtctctactaaaatagtacaaaaaaattagccaggcgtggtggcgggcgcctgtagtcccagctactcgggaggctgaggcaggagaatggcgtgaacccaggagacggagcttgcagtgagccgagatcgtcccactgcaccccagcctgggcgacagagcgagactctgcctcaaaaaaagaaagaaagaaagaaagaaagaaagaaagaaagaaatctagccccttcctcagggccgagagaattttgagcactagccttctctcggtcgcctgaattcatctcagagtgtggcatttctctgcaactcactcggttacaacacggggtgtggattattcaggagtgttctgggaaggggttgaggattttccagaactaagggttcctcgcctttctagactctctaggatagcttccggacattgccatggcatctgtaaactgtcatggcgcttgcgggagtttcttttagcagctaatacatgataattagtgtataataagaatgaacaatgaggacaaccacaggtcagttttgtcgccatcttggttttggtgggatttgggctggcttctctaccgcagcctgtttaatcagtagggtctttatgacctgtatcttgtgtcgacctcctatctcatcctgtgactaagaatgcctgatctcccgggaatgcccagcaggtcgcagcctcatgttacccagctcctgttcaagatggagtcacactggttcaaactcctctgacaagtttgtaaaacttatgaaactgcgggggctgccctaagacttctgcacactgagtcttgagcgattcgtcaattaccgttcaggtttttctaccccggtactggttcctgaggtgttttctgctccagtaaaccgacactctctctctgactctccaattcataacaaaacatttcatgacacgaaacacaaacatacataaaatgtactttttttttttttgagatggaatctcactctgtcacccaggctggagtgcagtggcgggatctcagctcactgcaacctctgcctcccgggttcaagcaattctcctgcctcagcctcctgagtagctgagattacaggcacgtgccactatgcctggctaattttttgtacttttagtagagacgggtttcaccatgttggtcaggctggtctcgaactcctgacctcatgatccacctgcctcagcctcccaaagtgctgggattacaggcgtgagccaccatgcccagcaaaatgtacctcttttaccattttctttttttgagataggatcttgctctgttgcctgggctagagtgtagtggcacgatcacagttcacttcaggctcaacctcaccaggctcaagcgatcctcctccgtcagcctcctgagtagcttggattacaggcaccagacaccacacccagggcagctgtttgccctgtgtccttgtaactacccagtgggttcaccttgctctccgcctagacagagtcaatttctcaagacaggaattgcagtagagaaagagtaattcacacagagccggctgtgtgggagactggagttttattaatcaaatcagtctccttgagctttctgggagcagagcttttaaggacaacttggtgggttgggagaagccagcgagccaggagtgctgatcggtcatggatgaaatcacagggagtcaaagctgtcttcttgcactgagtcagttcctggtgggggaccacaagatctcatgagccagtttatcaatctgggtggtgccagctgatccatcaagtgcagggtttgcaaaatatctcaagccctgatcttaggagcaatttagggagggtcagaatcttttagcctctagctgcatgcctcctaaaccatcatttctaatcttggggctaatttgttagtcctacaaaggcagtctagtgcccaaacaagaaggaggtttgttttgggaaagggctgttatcgtctttgttttaaactataaagttcctcccaaggttacttccgcctatgcccaagaatgaacaaggacagcttggaggttagaagcaagatggaggccaggcgcggtggctcacgcctgtaatcctaacactttgggaggccaaggcaggtggatcacctgaggttgggatttcgagaccagcctgaccaacatggtgaggtgagaggatggcttcagcacaggaggctgaggctgcagtgagctatgattgtaccattgcactccagcctgggcaacagagcaagaccctcatcccaaaacaaaagcaaaaataataataataataaaccccaaccctcacccagtctgtagtacttagttatggcattcctaacagaccaatacagtgaaactaggtctatcgccagaaaagcccattctgtgggctaacagaatatattgtcccttatttttttattttttttgacagagtatcgctctgtcacccaggttggagtgcagtggtgtgatcttggctcactgcaacctccacctcctgggttcaagcaattcttctgccttagcctcctgagtagctgggattacaggcatccaccaccatgcctggctaatttctgtatttttagtagagatgtgttgtcaccacattggccaggctggccttgaactcctgacctgtgatccgcccacctcagcctcccaaagtgctgggattacaggcatgagccaccgtgcccagtctattgcccgttatttaggctgtatctttgtgtagctcctccacttcccagaaccctctatcttctcagaggcttaggcctggagatccattttctttctctagattctttgagacccacttccttcaaattcagctccccgtctgcctggtctcaggggccctatctttggggatgaataagatgatttattatttttttcttcagtcattttgcactttcacatattcttctgggtcatcttctcataatgtccaaagacagtctagactatcagttcctctagctggttcttctgccccctgtgagatgcaaggataagtaaaaccattcggggaactggcttggagctcagccagaaacccttgcagaaattggcagagggagaatctgtgcacagcaacgcttgcagacgttaggtgtcccttgcaaagggagtggataaacacacagctgcccactgtgtaagttcaccagcctgtgccccgagctctaaacaggactggggaaaggtttccaagatgtatttcttatcagcagcctgcagttaggaaacaaaaattgcaacagtttttgttgctttattttagtttttaaggaagtatatggttagattgttgctaaggtttataaggtcatatgtctttttctttttttcttttttcttttttgagatggagtattgctctgttgcccaggctggagtgcagtggcatgatctcagctcactgcaacctccacctctggggttcaagcaattctcttgcctcagcctcctgagtagctgggattacaggtatgcaccaccacactcggctaatttttgtatttttagcagagacagagctccaccatgttggccaggctggtctcgaactgtgggcggaggattacctatgtgccgagtcaagagactgaaggcacaaactgtttcagtataataaagaaaatagttagaatagtcataatacaagttagatatagagatgatcatgaacagttattaatcattattataaacattaatcattagcttttaatattactctttgttgcattactaatataacctaggaataaccggcggatatagggtcaggtgctgaagggacattgtgagaagtgacctagaaggcaagaggtgagccctctgacatgcccgcataagggctgcttgagggctccttggtcaagcggtaacgccagtgtctgggaaggcacccgttacttggcagaccgcgaaagggagtctcctttccttggaggagtcagggaacgctctgctccaccagcttcttgtggaaggctggatattatccaggcctgcccgcagtcatccgggggcctaaacccctccctgtggtgctgtgcttcagtggtcactctccttgtccactttcatgctcctccagtactcctggttcctctttgaagttcacagtagatagtggtagcagaaatagtgaaagtcttaaagtctttgatctttcttattagtgcagagaagaaaacgctgacgtatgctgccttctctctctgctacctaaaaggtaagggccccctatcctgtcatcatcctgtaatcacgtgacttgcctcaccttgtcgatcacttagaagattcaccctccttaccctgcccccttgtcttgtatgcggtaaatatccgcgtgcgcagctgttccgggctactaccagtctccgcatcttgatggtagtggtcccccgggcccagctgctttctctttatctctttatcttgtgtctttatttattacaatctctcatctccgcacacggggagaacacccgctaagccccatagggctggaccctacattgaactcctgacctcaggtgattcacccgcctcggcctccgaaagtgctgggattacaggcgtgagccaccgcacgcggctggtcacatgtcttcaacattgtgcaatgagatcaactctatattaaaagaaatttaagagatcacatttcattggagatgtacaaaaccaatgtcattaggtccctttatatggcacacacaataaaacaatttgattcctccatttagcaggcagcataaaataatttggttgctttgtagaacatgcactgacgaataacgtggtcccctcatgcagaatgcaccataaaataattggacaggatggtgggtgctgttttattttggggcctattttatcaacttcattgaggaataatttgtgtacaacaaatggcatgctttggcagtgtacaatgtgatgttttgacaagcactgttaacaatgctacagtaaaaatatggatcagtccgggcacggtggttcatgcctgtaatcccagcactttgggaggccaaggtgggcagatcgtttgaggtcaggagttggagacgagcttggccaacatggtgaaaccccgtctcgactaaaaatacaaaaattagctgggcatggtggtgcgcgcttgtaatcccagctacttgggaggctgaggcaggagaattgcttgaacccaggaggcagaggttgcagtgagccgagattgcaccactgcactccagcctaggcaacagaataagactccatcttaaagaatatacatagatcatttccatcattcccctaagtcccctgggaccctcttgtaattcatccttccctccaccccggccctaggtaaccactgatttgctttctctacccctaaccatatatggtttgtgttttctagaatttcaaatacatagagtggttaattttatatgtcaacttgtctagactgtgggaaggtatttttaagctatgattaatgtttatagtcagttgactttcagtaaattagatgactctctataaagtaagtgggccacttctaatcaattgaattccttaggagcaaagataggtttcccgaagaagaaggaattctgacttcagactttaacatagagatatagaaattctgcctgtgaattgcaacaaaagcaaaaattgaccaatgggatctaattaaactaaagagtttctgcacagcaaaagaaactgtcatcagagtgaacaggcaatggccggacctggtgactcacgcctgtagtcccagcactttgggaggctgaggagagtggatcatgaggtcaagagtttgagaccagcctggccaacatggtgaaaccctgtctttactaaaaatataaaaattagcggggcgtggtggtgggtgcctgtaatcccagctacatgggaggctgaggcaggagaattgcttgaagctgggagaaggaggttgcagtgagccgagattatgccactgcactccagcctgggtgacagagcaagactccatctcaaacaaacaaaaaattaactgggcatgatggcacatgcctgtagtcctagctactggggtggctgaggtgggaggatcactagagcccaggaggctgaggctgcagtgccgagattgtgccactgcactccagcctgggcaacagagcaagactctgtctcaaaaaacaaaacaaaacaaaaacaaaagcaacaaacaaacaaaaaacgagtgaacaggcaacctacagagtgggagaaaatctttgcaatttatccatctgacagaggtcgaatatccagaatctacaagaaactcaaacaaatttacaagaaaaagacaaacaacaccattgaaaagtgggcaaaggacatgaacagacacttctcaaaagaagacattcatgcagtcaacaaaaatatgaagaaaagctcaacatcaatgatcattagagaaatgcaaattgaaaccacaatgagataccatctcatgccagtcagaatgaccactattaaagagtcaagaaacaatagatgctggcgaggtggcagagaaataggaatgtttttacactgttggtgggaaagtacatcagttcagcccttgtggaagatggtgtggtgattcttcaaagatctagaaccggaaataccatttggcccaacaatcccattactgcaaatatacccaaaggaatataaatgatactattacaaagatacatgtatgtgtactttcattgcagcactactcacatagcaaggacatggaatctacccaaatgcccatcaatgatagactggattaagaaaatgtggtacatatataccatggaatactatgcagccataaaaaggaatgagatcgtgtcctttgcagggacacggatgaagctggaaggcattatcctcagcaaactaacgcaagaacagaaaaccaaataccacatgttctcacttatagtgggagctgaaaaatgagaacatatggacacagggaggggaacaacacacactgaggcctgtcagggggtggggttgggagagggaaagtattaggaaaaatagtgaactcatgttgggcttaatacctaggcgacagattgatagctgcagcaaaccaccatggcacatgtctacctgtgtaacaaacttgcacatcctgcacatgtaccccagaactaaaaatacacatttaaaaatgtttttaaaaagaaacaaggctgggtgcggtggctcacacctgtaatcccagcacgttgagaggccgaggtgggtggatcacctgaggtcaggagttcaagatcagcctggccaacatggtgaaaccccatctctaccaaaaatacaaaattagctgggtatggtggcacatgcctgtagtcccagctactcgggaggctgaggcaggagaattgcttgaacccgggaggcggaggttgcggtgagccgagatcacgccatggcactccagcctgggcaacccaagagtgaaattccctctcggggaaaaaaaaaaaaagaaaaagaaacaaagctgggtgtggtggctcacgcctgtaatcccagcactttgggaagccaaggtgggtggatcaccttgaggtcaggagttcgagaccagcctggccaacatggtgaaaccccatttttaatctctactaaaaatacaaaagttagccgggcgtggtggtgcatgcttgtaatcccggctattcaggaggctgaggcgagagaatcgcttgaacccaggaggcagaggttgcagtgagccaagattgcgccattgcactccagcctgggtgacagagtgagactctgtctcaaaaaataaataaaataaaataaaataaattttaaaagaagaaagacattttgcctgtgctttaagcctttgggcccaagactgcagtatcacctcttacctgaatctgcagcctgtcagattgccttagggatttcggacttgtaacccctacaatcccgtgagccagttccttaaaatcactctctctctctttctgactctctgtctccctctctctgtctctctgtttctcctcttagttttgtttctctggagaatcttggataatacaagatccttttagtttattccctctttgtgtctggcttcttttctgtcttttttcaaaaatttgcatgaatgtatgaggtacaagtccagttttggtacatggattactgcttagtggtgaagtctgggcttttagtgtagccatcacccgagccatgtacattgaacccactaagtaatttctcatccctcactccccttccacccttccaagtccccagtgtctattattctacactctacgtccatgtgcacgcattatttagctcctatttataagtgagactatgtggatttgactttctgtttctgagttgttttatttaagataacggccttcagttccatccaggtgttaccaaagacatgatctcattcttttttatggctgagtagtattccacagttcatatatgtggggggttcagtcagagtggttggaaaaactataaggaaaggactcaaaccttctgaaagtttggaaggttctgcagagccccgggggaggaatagctgaaggcagctgttctataaccctgaggcagagggcaaggagtaggtacaagggagtgtgggcgaatttatcttaagcaggcctgtttacttacgttgaccaggaactgacttttgatcatctgcctatgtgatgttccctgaaaggggagcaataaatgttaattacctacaggttgtgtgtactccatgtttttggcattgtgcccacactgaacaaatgcaagcagctccagcttctcggggctgctctctggccgctagagccaggcagtcacctggctgctcttacactgcatacctgtgtctgactactcatttcatcccatcggccagggtctgcgggacagacccagtacacatacaccacattttctttatccagttgtctgtagataagacacttggactgatttcatatctttgctcttgtgaatagtgctgtgataaacctacaagtgtgggtatttttttgagaaaatgatttcttttcatctgggtagagtgggactgtcagaacgccttctcaatttttttctttttttagagatggggtcttcctctgtcactcaggctggagtgcaggggtgcaatcatggctcactgcagcctcaaattcctgggctcaagcgatcctcctacctcagcctcccaagtagctgggactacagacttgtagtaatttttgtatttttagtagagacggggtttcaccatgttggtcaggctagtctcaaactcctgacctcaagtgatctacccacctcggcctcccaaagtgctgggattacaggcatgagccatcacacctggctccctcttctgactttttgctctgtatcctttcactgtaacaaatcataaccattagcaagactatatgctgagtcttcttagagaatcattgagcttggggaggggggtctccgggacgcctgataaaccacccctacctttaaagaaagagccttaggagccatagataaaccatgaagtctttggaggacaatgaagtctttgcatccacctccctcttagaaaccctgattcttttctcctgcaaaagggcagctgctgttcatttctcaccccctcaagaattgtggtcttccttctggggaagcggggtagggatgcaaagttcagtagattcatctatttctcttcccttctttttcctcatttgtttctttattttctaggatacaacagccaatgaaattctttccctgccctgagaaaatgctcagttttttgagggaaacagacattcaagcaagcatagataatactgactatggtgatggggggggaggatggaggaggcgcctcactctcaagtggaagtcaaggaaggcttcctggaggaggtgatatttacacagaaaggttgtataggattggggtgaatgtgcatttcagacttggtgtcaagagagaactgggtttggtggcacatgcctgtaatcccagcactttgggaggctgaggcaggaggatcgtttgagcccaggagtttgagaccagcctgggcaataaagcaagatctcatctctaaaagagaaaaaaaaaaattagcagggtatggtagggtatgcttgtggtctcagctatttaggaggctgaggtgggaggattgcttgaattcaggcagttgaggctgcagtgagctgtgactgagccgttgcactccagcctgggcaacagagcaagtccctgtctcaaaaaaaagaaaagaaaaagagagagagtttgaagtagaacttgctgtgaggtttcttgtgcacaggtgtttttgagggagaagatcaggacagagcaagggaatgagctaagcaaggaagtggtcttagctggagtccagccttagccggatcccatggggagccctggagtgtgactggtgccaccaggttggtctcaccctgggggcatggggctggccttctgcacctctgtgaccatccgttatggctgtgggctgggtctgagggtttgcacagttgctcagctgaggagaagggggaagctgtgagctatgagctattgtaggcagcactcactcacagcagccccaggatgggtgcaccagcctgggaaaggtcagtgagcagagcgttgactgcacccacaacagggacttcaagtattttataatcactggggggctttttgttgttgtttttttgagacagggtctcactctgttgcccaggctggagtgtactggtgccatcacggctcactgtgaccttgacctcctgggctcaagcaatcctcccgagtagctgggactacaggcatacaccactaggcctggcttattaaaaattttcttttatagagatggggtttctccatgttgctcaagctggccttgaactcctgggctcaaacagtcctcccaccttggcctcctgagtagctgggaccacaggtgtgcaccagccactatgcccaactaattaaaaaaaaatttttttctgtagattcaggatctcagtatgttgccttgaactcctgggctcaagcgatcctcctgccttgatttcccaaagtggtgggattacaggcatgagccactgtgtctagctgatcactagggctttagggggagtggagatcaataaaacaagatggggagaccagagtcagactacgtagagccttgagtgccatattaataagcctgaacttcatcctgagggcaatagggagccatggaagggtttagagtctaagcagggcgtggacaggttaggcagggattccccaacttccctgccccttcccggcactctgtgtgacggtaagtgatgttcctgcagctccccaggctgatttcttcaatcttgagagtcccttgtattcccctttgctagggaagtcattaggggttagattttgtaagcttcttggccagaattgttgatttcctcttccacatctttccccttcctgttcttacacccccacccgcaactctgcagggccgctgcaggacagtctttatatagcttcggtcacctctgtgggtttgaagggtgtctggagtcttgggttttcagtgtctcactaggacccgataccctgcctgtggtaggtgggataaagggcctcctctccctccacgaggcacctacagcctaatccctaaagcccaaggatgtgttcccttctatgacaaaagggacttttgcagatgggattcagttaagggctatttttttgggggggaggtggggggagtggggacagagtcttactctgctgcccaggctggagtgcaatggcacgatctcagctcactgcaacctctgcctaatgtcattacaagaattcttacgagaaggagacaggaggatcagggagagagagagagatggagagatagagatacacagagagtgagagagagagaaagaatgagagagaacgagagagagagagagagaacaagagcaataaggagagtgaacaagacagacagaatgggccaggcgcagtggctcgcgcctgtaattccagcactttgggaggccgaggcgggcggatcacttgaggtcaggagattaaggccagtctagtcaatatggtgaaaccccatctctactaaaaatacaaaagttagccaggtatggtggcagatgcctgtaatcccagctactcgggaggctgaagcaggagaatcgcttgaacccgagagacggaggttgcagtgagccgagatcgtaccactgcactccagcctgggtgacagactgagactctgtctcaaaaaaaaaggagaaaaaaaaaagagagaatgaaagagcaagagggagggaaaaatgagagaataagcaagagagagaacttgagagagagacagacagagaaaaagagagagaatgagagagcaagagagagggaaaatgagagagagagagagagcaagaacgagagatttagagtacgcaagagacatttgaaactgctagctgctggctttgcataggaaggaagggaccatgagccagggcatgtgggttgcctccagaagccagaaaggacaaggaatggattctgccctggagcctcgggaaggattgcagccctgctggcatcttggttttagtcccatgagactcgagaggactctgacctctggacccatcatatactaaatctgtgttttccccaagctgccaggtccgtggcaagcctcatcccatccccatccccagaagggatctgggtttgattgcaaaaccttccaactctttagcccagcctccaaatgtcgaatccttcttctgtctcaaactcccctgctacatctagacagtccccaaattcggttgttcctgcctcctaaattctccgtcactatagcccctgccccagaccaggccactgttctcttctctctcctggctgtatccccagcctcctccctatctgcccacctgtgaacccatcctgtccaatacccacctacaaaacacaaacataaaattccaacctgagcctgtggctcctttgctgaacctccttttattgccccgagggtaaagcctaaactctttcacccaccttataaggttctgtctgatatgaaatttgctggcttctccaattcaaattttgctggtatcaggattttttctatgagtagctgcaactatttagcatggtggaataataataataccaataataactaatagtatttaagcatttaatctgtgccaggcacagttttattattgtatcaccttaaccctcaaactccatgaagttagaccctttatttatttatttatttatttatttttgagacagagtctcgctctgtcacccaggctggagtgcagtggtgtcatcttggctcactgcaacctccgcctcccagattcaagtgagtctcctgcctcagcctcccgggtaactggaactacaggcgtgtgcccccatgcctgcatagttttttgtatttttagtagagacggggttttaccatgttagccgggctggtctcaatctcctgacctcatgatccacccgccttggcctcccaaagtactgggattacaggcatgagccaccacacctggccctagttagacacattattaccctcattttattaatggtgaaaactgcttcttaggtgtattggttatctcttgctgtgtatcaaattactccaaaacttagcagcttaaaatagggaacttttagtctcttacagtttctgaggatcaggagtctgggggtggctgagctgaataattctggctcaagctcttgcttgaggttatagtcaagccattgaccagggctggctcatctgaaagttcgactggggtgggaagatttgcttccaaggcagctcactcacatgactgttggtgggaggctcagttcctccacagcactgcttgaatctccttacaacatggcgactggctactccccagtgcatgaccctggaaagagagagcaacgaggatgccacaatggcacgtatgacctagtcacaaactgtcatgtgctcctttttctgatcaatagaaacaagtcacactgggcatagtgtctcatacgtgtaatcccagcactttgggaggctgaggcaggaagaccacttgggcccagagttcaagaccagcctgggcaacatagcaagatcctatctctgcaaacaaacaaaaagtcagctgggtgtggtggcacatgcttgtcatcccagctacttgggaggctcatgtaggaggatcacttgagcccaggacttggaggctgcaatgagctatgatcatgccactgtactccagcctgggcaacagagcaaaattctgtcttaaaaaaaaaagagagagagagagagagagagaaacaagtcactaagtctatgttcaaggagagagggattagtctctaccacctgaagagtatgaaagaactgatggatatgttaaaaccaccacattggtcttcctgcctctagagtccacactcctggatacactgaacaaggattataggagaaagtgcaagcctctggcagtcacttctagtagataacattacctgaaagggaattatggggggaggaggagagcgaggaccaatatcaccaggggatgggaggtgggaggggagagctacatctgtggtctctgcagagcagacacttttccagggaaacccttttctttctaatctttgtgagtcccccagtggatatttgtgtatctgagacctatgagatactcgtcctatgagacctcataggacgctgagaccccacattcagcattctatgatcaggagcatatggagaagatgtgggtgcagagacattgctcaaagaatacaaagtttcagttgaacaagaggaatatgttcgagagatctattgtacaacatggtgactgtagttaataacaatgaacaatgtagcatatccttgaaaattgctaagagggtagatgtaactattcttaccacaaaaaaatgacgtgcatgcaaaggaacagataggtttattgcctcgatttagccattccaccacatatacgtatctcagaacaccatgttgtacaccataaatatatacaatttaatttgtcaattcaaaaaagaattttttttttttttttgacagagtcttgctctgtcgcccaggctggagtgcaatggtgcagtctaggctcactgcaacctctgcctcccaggttcaagcaattctcctgcctcagcctccatgtacctgagattacaggcacccaccagcacacccagctaatttttgtatttttagtagagacggggtttcaccatgttgaccaagctgatctcaaacccctgacttcgtgatccacccgcctcggcctctgaaagtgctgggattacaggtgtgagccactgtgcctggcccaaaaacggaaaagaaaaaaagagagcacatagacctcacatattaactaggggaaataagaagtcaaaataaaccaaggctcagaagccaacgaattagagctggtgtttctcataggtctcagacacccaaatatccacctgcaggcttttttttttctttttttttgagacagggtctcactctgtcacccaggctggagtgcagtggtacaatctcagctcactgcaaccttctcctcctcccgggtttaagcgattctcctgcttcagcctcccaagtagctgagactacaggtgtgcaccaccatgcctggctaacaaagattgtaaagaaaaggatttccctggacaagtgtctgctctgcagagaccacagatgtagctctccctgctcacctcccatcctctggtaacattagtcctcgctctccttctacccccagaattccctttcgggtaatgttatctactggaatggactgccagaggcttgcactttttcctataatcctggactctggatacagcgtggaacagaaaaatgtagaaggaagctgggtgcggtggctcacaccagcaatcccagcactttgggagggtatcgtgggaggattgattgagcccaggagttcaggaccagagaccagcctgggcaacattaccagactccatctctaccaaaaagtgttaaaaaaaaaattagccaggcatggtagcaggtgcctgtagtcctgctactcaggaggctgaggtgggaggactgctgaagcccaggagatggaggctgcagtaagctgtgattgcaccactgcactccagcctgggcaacagagcgagactctctaaaagaaataaaaattttttaaaaatttaaaaattacagagggggccgggcctggtggctcatgcctgtaatcctagcactttgggaggctgaggtgggtggatgacaaggtcaagagatagagaccatcctggccaacatggtgaaacccttctctactaaaaatacaaaaattagctgggcatggtggcatgtgcctttagtcccagctacttgggaggctgaggtgggagaattgcttgaacccaggaggcggaggttgcagtgagccgagatcgcgccactgcactccagcctggcaacagagcaagatttggtctcaaaaaacaaacgaaaaaattgcagagggaatcctagagctgtggaagtctggataggtgccctcttcagacagcagcttctttcaaacttaatgaggctttgcacatgctttattttatttttcttttgtattaccttttctgctaagtgtgattatctcctgctcattctccagggctaagcttagacgttagctcctttgggaggccattctctcaacccccaacctgggtcaggcctcctctggccaagtaatagcttcctcacctctggctttctgtatcttacaatggggaggacaatcctgtcttttccccagcaaccctggggtgttgggcgtgtggacatcatccatgcctgataacaataccaaccatctcaaccaagggaaatgagaagtcaaaagacaccaagagtcagaagccaacaagttagagctggtgtttctgtttatggagctcatggcaggcactcacctgccgcatatgctgagcggtttccagcatccctacatgctcaaggatcctgtgggacagggctgatcattatccctattctcctgataagagactgaggctcagagaggtgaatcacctcctgtggtcactttggaaataccttacagagtcaggatttgaacccatggctgtctgagttcagttcctgtcactgcaataaccaacacttggaacgttgggtgccaggctctgttcttggtatgccatatatactcactcctctgatgcccacaccaggtccatgaggcagatcctactcttttttttttgagacagagtcttgctctgtcacccaggctggagtgcagtggcacaatctcagctcactgcaacctccacctcccgggttcaagtgattctcctgccttggacttccaagtagctgggattacaggcacgtgtcaccacgcccagctaattttttgtagttttagttgagacgggatttcaccatgttggccaggctggtctcgaacttctgacctcaagtgatccacccgcctcccaaagtgttgggattacaggcatgagccactgctcctgggtgagatcctattcttaatgcgcccattttacagatgagaatatttgaggcaagcagtggaggtgggatttgaacctctggcaatatgtttccagagttcatctccagtgcttccggaaaccacaatgcagctctgtttgtaccccttcctggtggaatttactgtattttcatgctgactcttaagttcagcctctccaggcagtgtcccttattttccccttaagaaaaaaaaaaagtgcaactggctgtcagcacttacttaattttacataaacaccctttttggggctgaagcaaatctgacttcttttcttttttttttcttttagaaaaacacactttattcatatttctttggggttttgttttgttgttgttgttgtttttgtttgttttttgagaccaagtcttgctgtgtcacccaggctggagtacagtggtgcgatctcagctcactgcaacgtctgcctcccaggctcaagctattctcctgcctcagcctcccaagtagctgggactacaggtacgtaccaccatgccgggctaatttttgtatttttagtagagacagagtttcatcatgttggccaggctggtcttgaactcctagcctcaggtgatccacccacctcggccttccaaagtgctgggattacaggtgtgagccaccgtgcccagccaaatctgactgattttcaatgtgaaaataaaatataaaaacagttcttggagttatttctaaccagaactaacatcagaatcgtcaattttggaaaaattggattcatcagataaattttcagccaacaactgtttgagaatgatagtaacatcatgcgtaggaatgctacacttttctaggatctgacattttcagcaatcaagaattactgtattttgtaaaatatactatagtatatagtaaaaaataccatattttgtaaaatatagtaatctggaaatatccctactaaaaacagaacactataaatagaatcatgtcttttgttttcaaagttgatacactagagcaatgcaaaaataataataaaggtgagatatttcacggcaaagttatctctgggtaaatgctgcagccacaagcgccaccagctagtattcttggggccaacggggaaagaatgaaggcacaaacagaaagccactgatgaatctggctagacgcggtgtctcaggcctgtaatcccaacactttgggaggccaaggtgggaggatcacctgaggtcgggagttccagaccagcctggccaacatggtgaaacctcgtctctactaaaaatacaaaagttagctgggcatggtaatacacgcctgtaatcccagaaactactcgggaggcggaggttgcagtaagccaagatcacgccactgcactccagcctgggtgacagagcgagagtccatctcagaaaaaaaaataaaataaaataaaaaaagaaagccattggtgaatctttgttccagtgacaataactccaaagctggtagtttgctttgcaaagaacaaaaggggaaggcaaaaacacgtggagcttttctttctaagaattcggggatgttctatgcacctcctttgtaccttgtgacagctgctatcagtggctgcccacacccataacctaacaacacattaatatgccctagcttaacgctgatacgggagctagaaagaagttatttaggcagagagtgagggcaagagagtcctcggtaaggtttgccttttaataaaaagcagcccccaaatcatttattttattttatttttttttttttgagacagagtcttgctctgtcgctcaggctggagtacagcggcacaatctcggctcactgcaagctccgcctcccggattcaagcaattctcctgcctcagcctcccgagtagctgggattacaggcgcatgccaccatgcccggctaatttttgtatttttagtggagacggggtttcaccatgttggtcaggctggtctcaaactcctgaccttgtgatccacccgcctcggcctcccaaagcgctggaattacaggcgtgagccaccgcgcccggccaaataatttcttttctaaaaaagagcagtctgaaaaatcagccggcagacatagaaaagcaagctggaagcttgctcgggtgaatgccggcagctgtgccaatgggaataggctacctgggtgccaggcgtgttcaacatgcaggcttgctccatgttcccttttctttatcaaccacgtgtacggtaaaggaacaggcaacatggtcctggccaggtagagaccccatctgcataataaaatattagggtgggcagccagcttctttgtactctatgtaaacggcacacctggtccaactaatctttgggcccttatgtaaatcagatatcaccacctaaagctcatctataaaaccccgtgcatttcaccatgaaactggaagacccacttgggagccccctctctttgcaggagagagagcttttctctttctctcgcctattaaatttcttttctttctttctttttttttttttttttgagatggagtcttgctctgtcacccaggctggagttcaatggcacaatctcggctcactgcaacctctgcttcccgggttcaagcgattctcttgcctcagcctcctgagtagctggaattacaggcatgagccaccacacctggctaatttttgtatttttagtagagatggggtttcactatgttgcccaggctggtctcaaactcctgatcttaggtgatccacccgtctcagcctcccaaagtgctgggattacaggcatgagccactgtgctcggcctaaacctctgctctaaaagtaattttttgtgtgtctgcattttattttattttattttattttattttattttattttattttattttattttaagacagagtcccactctgttgcctaggctggagtgcagtggcacgatctcggctcactgcagcctccgcctcctgggttcaagcaattctctgcctcagcctccggagtagctgggattacaggtgcctaacaccataccacactggctgattttttgtatttttagtaaagacggggtttccccatcttggccaggctggtcttgaactcctgacctcgtaatccaccctcctcagtctcccaaagtgctgagattacaggtgtgagccacggtgcccggccatgtctgtattttctatttccttggtgtgaggcaatgaacctcgggtattaccccagatggatgacactgcttcaatatctgccagtcactacactttgttatcagtgggattacatcaactggagcccattctatctgcttggaggccaggcctgaagattcaaggggttgacaccctctaggagcaagcctcaagtcaacccatgactgacagtaggtgggatataaatacctcagctccctcacccctcggttggaataactgaagagtatgttccatgccgctccccagtcatccctggggaggttaagttccactttctcaccatgtaacttatttgaagacacacccagtattggctctttgcctttcctgattcactttctcctcccccagctggtgctttctggggccaccttcttgataaactacttttgctagaatccttgtctgagggtctgcccttgtgagaccctaagatgttaccagagagagttaggaagctgggaatggggtggaagtgttgctgtataatcgtcagacagagttgagatctgaaggaaaataagatggttaaagctcttgactctggaatcagagggtcctgggttcaaatctcaagtctgagagatcttggacaagttataactcctctgcaagtctcagtttccattttgttggtgaatagagggagggaggggaattcctactttacaaggttaacatgataatgaaattacactttgttgccaatgtgcctagcacactgcctggtacatgatggttgtgatggctgtctttatacgggagactgggaagagaccctaaaggctgagatttgcttcactggaggcaggaagcggaagctcctttattgggtgcaatgaaagaaggtgttgagagatgggagatagatgttgatgggaaagaaaaagggagagaccatgggaaggagagagagagagaatgatatacattaggcagattaacttctctttattgtgaagaaagggggaaattaggattttctaggctgtcttttagttgcagcaagtcagcaaaaagggctatgatgaccaggcagcattgagcaactctgactccgccttcccctcttcgcacaccttctggttactgaaaacccagcgttagtagaaaagtttcttttctttgaatgacagaactacagcataatgcgtggcttcaacctgctcctcttctggggtgagtgtgaggctgaatggggggctaggggaggcctggattggaaatagacttcaggagaaatgggagggccatggatggtccagccaagagatcataagtccagactggatgctgcaaacaccttcattcagggaacctttgacaaaattccatagctcagggaagtccatctgttaggatagatttttctctatagtcattcatttgacctgagcaagtcctgtgtgtcaggtgctgttctaggcactagaggatatagcagtgagaaaaaaagactaagttcctgcactcttgaggctgatattctagtgggtaggagcagacaggaaagaaggcacagatgatcatagcccacttagcactgctgtaacttctttaaacatagagtgtatccaattgtcacaacatttctatgacattgggtcattattagtcctattttgcaaatgagaaaactgaggcaaaagagataaaataattttcccaaggccacttagtcaataaggggtagaggcaggatttcaagccagacagtctgacttcagagtctgtaagcttttccactatactatgttgccccaaaaaataagtaaacataggaatttcaggtagtgataagtgctatgaaagaagttgttatagaatgtggtcgggagttatgttgaagggagaagtctggggttgaggaggggcagttcgagctgagtcctgaaggatgagatagacccttcctgtgctcttatttctctttcttcaggtgtcagtttgtctcagccttgtttatcttctgtgtttctggtttttcttctatgtcttgtgtgttttggtcattggatcaaatttaagaatggaggatattggggacatattctaagtagcaagtatgggtttcctctgctgttgaagagtggatctgaataccctattttaccaaggaggaaactgaggcacaaagagattaaataacttcctcaaggccacgcaatcattaattggtgaagccagatttttaaacctaagcactttgacttcagactttgtatgcctaaacagcatgctgaattacctctaaaataattaatgaatgagtagaagaatttttgttagtaataatagatagaatttgggagtttagatctgtgggacttgttgactggcaggctacattagaagaaataggtggcctgtggacatcaaatgtaggcatgcagagttgttattttggggtgttggcaatggtattaaccattaacactccctattctgccctgaagataatcagcaaagagttgtgataatgatagtgatgataatgatcatgatggtggtggttataatagtgatgatgaaaatggtgatgatgatggtgatggtgatgatgatgatgatgataatggtgatgatagtgataatgaagatgatggtgatgatgatggtgtgataatgaccatgaagatggtgatgatggtgatgatgataatggtgatgatagggataatgatgatgatggtggtgatgatggtgtgataatgacgatgaagatggtgatgttggtgattatggtggtgatgatgatgatggtggtgatggtgataatggtgatggtgatgatgataatggtgatgatggtgataataatgatgatgatgatggtgatgatgaagatgatgatggtgatgatgatagtgataatgatggcgataatgatgatggtgcaggagacctaaatgctgcagggctgcattgcctttaaacactaaaaaatgggcagggcgcagtggctcacgcttgtaatcccagcactttaggaggctgaggcaggcagatcatgaggtcaggagatcgagaccatcctggccaacatggagaaaccccgtttctactaaaaatgcaaaaattagctgggcgtggtggtgcgtgcttgtaatcccagctactcgggaggctgaggcaggagaatagcttgaaccagggagttggtggttgcagtgagcctagatcacgctactgcactccagcctggtgacagagtgagactccatctcaaaaaaaaaaaaaaaaaaaaaaaggaaagaaaaacgaattgccctaccctctcatgaaatgttaatactacagatatactgtatacctatatatgtattttctatatatacatatgtatcttatacataaaagagtaagcttaaaaagatctcttcctgagaaccaagtttgggtccttagaggatatatcaccccttttgagaatgcatgctttaatgtatgtttttgaaaatcagctagaacttttttttttagacagggtcacctaggctggagcgcagtggcatgatcttggctcactgcagtctctatctcctgggctcaagcaatccttccacctcagcctcctgagtagctggggctacaagttgtcaccaccacccagctaatttaaaaaattttttttttgtagagacaaagtctcactgtgttgtccaggccggtgtcaaactgctggtctcaagtgatcctcccaccttggcctcccgaagggctgggattataggtgtgcaccacagtgcttagcctggaactatttaatcaaaaagaaaaagaagataaagacagacaaaatgaaaagcaaaagcaaagtacagaaaaccaggaatggtcattgttaagcttatgcaaaatagtgtatgtttgttccttaactaggtttgtcatctagcctcttcaaacctatttctgtggggccaagccaggagtaattttgcaggttgagcccaaaaggtttttttttttttttttttttttggtggttcatggtgtttttcttttctttcttcacaggatgttgtgttatgcacagctgggaagggcacataagacccacacggaaaccaaacacaaagggtaagttggccagagagaatgcagatgcctgaaggggtagagaaagttttctccccggggaaacatcccaggaagctgagcctcatccagatgcttgctgggagctagttagcggcagagcaagggttaacatgcaagtctcctgattctcacttcaggctctttcctttgtgcttagaattgctgtgtgatctcagataagtcacataacctctctgaacttcagtttcccaagctgtgaaatacagataacaatagggatgttgtgaaactttaattcaaagaggtagctttggaaaccacctggtatgtagtatgagctttataaatggtagtgtagtgagagtagggatggaatttactcaaactacaactcaatgtgcaaaaaaaaagtgacttctttatgttttgttaaatactctcatctacataaactcttgctggataaaggaagaaagacattgtcagttcgtagttgttgatatggtttggctatgtcctcacccaaatctcaccttaaattgtaagaatccccacgtgtcaagggcggggccagttggagataattgaatcatgggggatggtttcccccatactgttctcgtggtagtgagtaagtctcacgagatctgatggttttataaatgggagatccccgcacaagctctcttgcctcctgccatgtaagtaagacataattttgctcctcatgattgtgaagcctccccagccatgtgcaacagtgagtcaaattaaacctcgttcccttataaattacctagtctcgggtatgtctttattagcagcatgaaaacagactaatacaactgttcccagtgtctctgtttcctggttcttctttgggcaacttagcaacttggtctatattgtgttaacagctcatctttcacattttttttttttttttgagatagattctcgctctgttgcccaggctggagtgcagtggtgcgatctcggttcactgcaagctccgccttccaggttcacgccattctcctgcctcagcctcccgagtagctgggactacaggcgcccgccaccacgcctggctaatttttttgtatttttagtagagacggggtttcactagaaaccaggctggtcttgaactccttaggtgatctgctcaccccagccttccgaagtgctgggattacaggcatgagccactgcgcctggcccctttgtaggactttttcaaaagggctttattgagatggttgggaaaattttctcaaggaagtgatgttccagtggacttaaaggatggatgaattgatgttacccaggcaaaggggcagggtgggatagggcatgtctggtggccagaacggtgggtgcaaaggtcctgaggttggaaagaatttggaggaccgagcgaaggtgagtgtgactgatgacacagggcaggagatgagatggggaggtggacaggtacctagtcccacaagaccgggttgttactctgaccttggtgggtttcagttgtgagggagagggctagtggaagagaatgatgggaaacttacagcattaagagaccacaagtgataaaatgccggaagtctgcatagagaaatgttgcctctacagatgaaagaggaagctggaaatgagaagagagataccatctgaggcctcatgcagggaagggaaataaacaaggcacattataggagcaaagaacgtagatctcaaaaccaaatgtgtaacaaaaacagggtgaataatgtcacaatcacgataatccattccttctgtttttatgatactttttagtttttccatactcctaattgatgttggcattatcgttggttcctctcttttcactcctcacatccaatccatcggcaaattttgttagtgttgctttaaaaaaatcctgaattgcattcccttcattgattccctctgggttgtatctactgacatctttcacctggacaagtgcagtcaccccctccttggtcagtttatttctgatcttctatagttcgtcttccaaccagtggccagaaggctcatgttaaaaccttatgttgtgtccctactctgctcgaaatcctcccatgactcccatctttctttgataaaaaacccaactccactattcacaatagtcaagatatggaatccacctcagtgtccgtcaacagatgaatggttgaactcaatgtggtctgcatacacaacggattgctattcggccataaaaagaatgacattccacaatttgcagcaacatggatgaaactggaggtcattaagtgaaacaaaccaggcacagaaagacaaatgtcacatgtcctgactcataggtagttgccctactgtgctactgagcactcgatctcattccttccatctaactgtggtttttgtaccaaccagtcaatccctctttatcccccttccccactatcctttccagcctctggtaattgtcattctgctctctacctccattagataatgatgatgatgatttttagctcccacgtaggaacgagaacatgcaatatttgtctttctgtgtctggtttatttcacttaacataatgtcctccagtcctccagttccatccatgtttctgcaaaggatgggatttcattctttctttctttttttattttttatttttttgagacggagttttgctcttgttgcccaggctggagtgcaatggcgcaatcttgggtcaccacaacctccgcctccccagttcaagtgattctcctgcctcagcctcctgagtagttgggattacaggcatgaaccaccatgcctggctaatttttttttatttttagtagagacgggggcttcttcatgttggtcaggctggtctcgaactcccgatctcaggtgatctgcccgccttggcctcccagtgtgctgggattacaggcgtgagccatcacgcctgcccgatttcattatttcttatggctgaatgatattctattgagtacatatacgacatcttcctcacccattcatccactgatagacacttaggttgattccatctcttgcatgtactttggattttgaaaggtctggctctgctgctctccagcagatgtggttgtgtgtctttgggtaagtcactcaacctctctgagtcatgttttattttcacatatgggtattgggaatggtgcccatttcctgtggctgctgtaacaaattgccacaaacttggtcgcttaaaacaaaaaaaacttacctatcattctggaggtcagaagtctgaaatgggtcccactgggctaaaatagaggcaatggcagggctgcgttccttctggatgctgtacggaagaactattttcttactttttcctgtatctagggtcaaccatgtttcttggctcatgtccccttcccccaacttcaaagccagcagtggctggccagctctttcttacatcacatcactctgacaatgcttttcttggtttcagctttcacttataaagactcttgtggttacattcattgcccctggatgatccaagataatatgcccatcttgagatcagcatgattagcaaccttaattccatctgcaaccttaattcctccttcgccatggaccataacatattcacaggttccagggattaggacatggtcctcttggaagggtctgttattctgcctgccacaaggatgacagcagcaagtgagcctctttcctagcacctgggagcctgctcccacctgtggtcttgtccttttgaagctcacagtgtggtggtgaaggtggccatgaaggagcaactcactgaaacaatcaagcagtcacggttttgatgaattccataaaagaagagctcagggagctgtggaggagtcagggaaggcttcctggaggaagtgatgctaaagcaagatctgaaaaatgagtggaagctggccaggcaaagcagaggcagagggaacagcatgtgcaaaggccctgtggtaggaaggctagaaatggagtgcaaagagaaactgacatgatgaggctgaatgatgtggttgggtctggtcactgggggctttgcagttcatgttgagtaatttgagttttatttctaaggagaacaaagagcattataggcaaggggtggaggtgggagatcaaatgtgcattcagagatgaccatggtgtggagtagaagattgtggaggacaatggggtatatagaaatgttaaattcagaggaagatctggatcaggcatagccaaggtggtggggttaaatgggtaattgtcaaattatatttgggaagggggatcaacagggcttggaggcttattaaatgtggtggctaaacaggcaacctgaggtacagacacgtgaaatcacttgtcccaagactggattggctaggatagagtgttgattgtttccatagaaacaaaataactatgaatgaaacaatgcagatgtttatttttatctgtctcataaatctccaacttgaagatggaacagcgtcgtggaacaaccttgcctaggaggtcattccatctcccaggtgccttttgccttgttgcctctccaatcttaggcgtgagcctcatccccgtggttggaaatggatcaccccagtctgtccatcttccagcccatgtgaaaagggagaaaaagtgtggagtatgctctttcttttcaagggcatgaccagacagtacacacatcacttctattcattctccttggccagattttcaccaggtggccacagctagctgcaagagaagctgggaatgcagtcctaaactggatggttctattattataaggaagagggtggaatggatttgggggaacagccaccattcttggctttgaggtttgctgctggaacttgaactcagatctgccttgtcccgaaatttgcagttttcactctcacacttttctgtctagtgcttggatgttcatggtgtgatccatggagcaacagaattggcatcctccaggcacttgttagaaatgcaaaatccccggcccccttccccagacctgctgaattagtacctgattttccaagatgttcttggaatccaaggggaggcaggtgatactggtctgtggatactttgggtagcaaggatccagatgagtgcttctcaaacttccctgtgcgcacacatcacctgggatcttgttcaaatgcagattctgattcaatggattttgcatttccatctaactcccaggagatgcttatgtggctgactcacagaccctactctgagtagaaagggtctaggatctttgaggtacatggttaaatatgattggttgctgtatccgtttcctagggctgcttaaaatgacagaaatttattctcttcaagttctggagtccagaagtgtgaattcaaggtattggcagggccagtctttctccaaaggctatagggcagaatctgttccatgcctttttttaaggcttttgttattgctggcaatccttggtgttccttggcttctagacatatcactctgatcccggtttgcactgttgcatggcactgtccctgtgcatgtctgtgtgtctcttctcttcttataaggacacctgtggcccaccctactccagcactacttcatcttaacttttatcttaattgcatctacaaagacccagtttccaaataagatgaaattcacaggtaccagggtttaggactgtaacgtatcttttgggaggaacacaatccaacccataacagtcacctccacccttgtatgctgggttcccttgcagcctcactctaatgctctaatcttgtctaaacttttctttatacactgcctaggtaataactgtagagacagtaccttgtgcccagcttatgccacctgcaccaatacagtggacagttactattgcgcttgcaaacaaggcttcctgtccagcaatgggcaaaatcacttcaaggatccaggagtgcgatgcaaaggtgagttcatgtcccctcaaaccatccagcatttggtaggaaaatcaagtcaaagctggctgggtattgaatgtaggtactcccccaccccccatttttttttaaatctggtttaactatatattttaagtggagtattaggtcatttctgttcaaggttaatattgatatgtgggggtgttgttactgtcacagcattgctagctagtgttgctagcaaacatgattttcttccttccttccttccttccttgctacttccccacccttcctctctttgatcatgtaaataattcctggtcactgtaaaatttcatggatggttgagtttcctcacaatatggtggctggattccaaggataagcatcccaagagaacaaggtagaactacatgatatttttatgacctagtgtcacttccaccatagtcacaagtatgctcagattcaagatggggacataccttccattgcttgacagaagaagtaccaaagtgaagtgcatatgggatgggagatattgttttaactttttttttttttttttttgcaaaatacagtcttctatctagtataagtaaatttgtaactccaattctctgtctagatattgatgaatgttctcaaagcccccagccctgtggtcctaactcatcctgcaaaaacctgtcagggaggtacaagtgcagctgtttagatggtttctcttctcccactggaaatgactgggtcccaggaaagccgggcaatttctcctgtactggtaatgctctcaggttcccagggatgggtcttgggtggatatctatcagtggggtgagttcatgtatttctgaactgaggcacccaatttcttatctgctcaccctcttccactgcttctcagatatcaatgagtgcctcaccagcagcgtctgccctgagcattctgactgtgtcaactccatgggaagctacagttgcagctgtcaagttggattcatctctagaaactccacctgtgaaggtatccatgaccatctctttattatttacctacttaattaattaagggtcatctcactggaagaccatatgagaaagggattttctcatgtagggataagaaaattggggctcagagaggtaaaaatatatagttgcttatatctttttctatccctttactttgagcctgtgggtgtctttacatgctaggtaggtctcttgtagccagcacatggttgggtctttttaaaaaattttttatctggtttaacaatctatatcttttaagtggagcattaggccatttctattcaaggttaatattgatatttgagggttttgttcctgtcacagcattgctagctagtattgctagcaaacatgatttccttccttccttccttccttccttccttccttccttccttccttcctacttccccacccttcctctctctgatcatgtaaataattcctggtcactgtaaaatttcatggatggttgagtttcctcacaatatggtggctggattccaaggataagcatcccaagagaacaaggtggaagtacatgatatttttatgacctagtgtcacttccaccatagtcacaagtatgctcagattcaagatggggacgtaccttccattgcttgacagaagaagtaccaaagtgaagcgcatatgggatgggagatattgttttaacttttttttttggcaaaatacagtcttctatctagtataagtgaatttgtaactccaattctctgtctagatattgatgaatgttctcaaagcccccagccctgtggtcctaattcatcctgcaaaaacatgtcagggaggtacaagtgcagctgtttagatggtttctcttctcccactggaaatgactggatcccaggaaagccgggcaatttctcctgtactggtgatgccctcaggttcccagggatgggtcttgagtggatatctatcagtggggtgagttcatgtatttctgaactgaggcacccaatttcttatctgctcaccctctttcactgctttgcaaatatcagtgagtccctcaccagcagcgtctgccctgagcattctgactgtgtcaactccatgggaagctacaattgcagctgtcaagttggattcatctctagaaactctatctctttattatttacctgcttaattaattaagggtcatctcactggaagaccatatgagaaagggattttctcatgtagggatgagaaaattggggctcagagaggtaaaaatatatagttgcctatatatttttctatccctttactttgggcctgtgggtgtctttacatgttaggtaggtctcttgtaggcagcacatggtttggtcttttttacaaaaatttttatctggtttaacaatctatatcttttaagtgtagcattaggccatttctgttcaaggttaatattgatatttgagggttttgttcctgtcacagtgttgctcgctacttgctttgtgatctcagttgtgtaattgctttataggatctgtgaactatatgcaaatattaagtggaagagctgggatttgaactcctgctgaggacctactataagtcaaacaatggtatcagaatataatggggtgcacttgtctccagaccgatattttccccaggggacattggcaacatctggagatatttttgattgtctcaaccggtgatggtggggagaggtgctgtgtatggcatctgatgggaagaggtcagagatgctgctaaacatcctataatgcaccgaaaggcccccacaaccaagaataatctgaccctaaatgccaatagtgctgaggtggaaaaaccttattctgggctgggcgcggtggctcacgcctgtaataccagcactttgggaggccaaggcggatggatcacttgaggtcaggagttcaagactagcctggcgaacatggtgaaaccttgtcgctactaaaaatacaaaaaattagccgggcatggtggcaggcacctgtaatcccagctactcgggaggctgaggcaggagaattgcttgaacctgggaggcggaggttggagtgagctgagattgtgccattgcactccagcctgggcaacagagcaagactctgtttcaaaaaaaaaaaatacccaacaacaagaagaacaaaacacacaaaacctattctggggagattctaaagtctaaacttcagaacgttcccctaaaaggtatttgaattaacagttgaaagttatctttaatcagccgggcgcagtggctcctgcgtgtaatctcagcactttgggaggccaaggcaggcagatcatgaggtcaggagatggagaccatcctggctaacaaggtgaaaccccgtctctactaaaaatacaaaaaaaaatagctgggcctggtggcacgtgcctgtaatcccagctacttgagaggctgaggcaggagaatggtgtgaacccaggaggcagagcttgcagtgagccgagatcacaccactgcgctccagcctgggtgacagagcgagactccatctcaaaaaaaaaaaaaaagaaagttatctttaatcttttctctcccttcacattaaagcagtcatcacaccttggagaatctacctgctaaatatgttttgagactgggtgtggtggctcacacctgtaataccagcacttagggaggctgagatgggagaatcgcttaagaccaagagtttgagaccagcctgggcaacatagtgagaccctgtctctacaaaaaaaaaaaaaaaattagaaaattagccaagtgtggtggcatgtgcctgtggtcccagctactcaggaggctgaggtgggaggatcacttgaaaccaggaggttgaggctgcagtgcactatgcttgcatcactgcattccagcctggataacagagcaagaccttgtctcaaaaataaatatataaataaatatgtgttgaattcctccactgttttccatccttggttcaggcttgatcatcactgcagcagcctcctctctagtcttgcctttttcagtcttattctctccaatccatcctctacactgcagccagaatgtcctcaccaagagacaagagctccatcttcctgtgtctagtgcattgttattctccacattcatttatgggatggtgactccattgagaaaggcaaggagtggtcaagccctcattatatccccctggcttagtttaagagatgtttgaaatcatctctgcctttgctactccatttgtagcagtgagctatcactgggtaacaaattgtcttaaaaattagtgtctaaaaacaaccaccatatatttagcgcttgattccatgagttgacattttaagtggtctattctagccagatcttttggtctcaactggtcttgttcttgtgtctgcagtcagctgaccttggctgggcttttgtcttgttgcctctgccaccttaggtgtgagcctcatccccatggttgggaatggatcaccccactctgtccatcttccagcccaggtgaaaagggagaagaagtgtagagtatgctctttcttttcaagggcatgaccagatggtgcacacatcacttctatttattctccttagccagattttcaccatgtagctacacctagctgcaagagaagctgggaatgcagtcctcagctgtattgttacattattacaaggaggagggaatgggtctcacatgtctggggctcatctgggatgattcatttctctcccatttggtcttttgttcttcattaggctagtcaggggcttgttcatatggcagagatcagaggcccaatagaatgaacagaagccaacaggtctcttgaggcccaggtttggaattagcacctcattacttcactgtcttctattggtcagtgcaagtcgtagggccagctgtatttaaggggtagagaaacagactccacctcttaatgcaaggtatggtaaagtcacatctcttacaatctacatcttggggtgtaaatacagagagaagtaaaggactatggctacttttccaatttctgataattatgttttgaaactatttgccacccttctgcttacatgctattggctagaatttgctctcatggccatgcctactgaaagaaggaactgggaaatatgtcccactgtgtgcctgggaagaaggggggaacatggatattggggagcatcagccctgtctgctgaaaatcaacactcagagtgcatctcctatttgtagtctctactccttgctttctcatttaccttgacctgggttttctcttccactcttcagacgtggatgaatgtgcagatccaagagcttgcccagagcatgcaacttgtaataacactgttggaaactactcttgtttctgcaacccaggatttgaatccagcagtggccacttgagtttccagggtctcaaagcatcgtgtgaaggtaggtgggggtgtcttctgagaagtcaggtccaagtctgtttgaaaagacagcagtgaggggattagggtgggtcttggttgagtttgagactttcatctgcaaatctgaagccaataatcattcattcactcattaaagaaatacctcttgagcacttacagtatacgtggcactattctaggcactggggatagagcagtaaataacatctccaaataacatcccactggggcttagggcttccatataggaatttggaggaggggcaccattcagtccatagcacccatgaacaaacagcttgtaagtgacagagccaggctatgaacccagaatgtccatgttctcaacccctccactgtgtgcctctttttgtttgtttgtttgtttgttttttgtttttttggggtttttttgttttttggttttgttttgagatggagtcttgctctgttgcccaggctggagtgcagtggtacaatctcggctcactgcaacctccccctcctgggttcaagcaattctcctgcctcagcctcccaagtagatgggattacaggcatgtggcaccatgtccagctaatttttgtatttttagtagagacaaggtttcaccgtgttggccaggctggtctcaaactcctgaccccaggtaatctgcctgcctcggcttctcaaagcgtttggattacaggcatgagccactgcgcccagcctgttttttgtttttgagacggagtcttggtctgtcgcccaggctggagtgcagtggcttgatctcagcttactgccacctctgcctcccaggttcaagcaattcttttgcctcagcctcttgagtagctgggattacaggtgtgtgccaccatgcccagctaattttttattcgggacaggtaagccccaaagtggggtttagctcacaagggttcttggctttgcccaggagagaattcaagggcaagccagaggtagaagaaaacagctttattgaagaggcagtgttgcagttctgtaagtgttacagctcctgcagagcagggctacttcataggcagagagcagcagctcagggcagttttgcagtcatacttatacctacttttaataatatgcagattaacaggtggtttatgcaaaaatttctagggaaggggtagtaacttttgggtcattgagtcattgccatagaaaggggcagtaactccccaatattgccatggcaatggtaaactgacctggcacactggtgggcatgtcttatggaaagctgcttccactctgtccttgttttagctagtcctcaattttgtccagtgtctgagtccctcatctggagttgagtcctgtttcctgcctcattactagcttagcataatagaaatgtatcactctcataataattcaatatggatatacctggctggtgggcagcttttctccacatggtgataaaggagttcaatctctctccatcttttggtttttgcattccttagagccttggtgttcctggtttagccagttgaggtgaaagagggaggagagaagtcacacccacttcttgaccaccttggccctgaagtgacatatatcatggctctcatattccatgagtgaaaagtagtcacatgacctcacctagatgcagagggttctaggaaatgtagtccctggctgggacaccattttctagtgaaacatgactccatattttgcaaagggaagcatgattttgttggctcattggccaacttggctccacacccattctgtaccccacagatattgatgaatgcactgaaatgtgccccatcaattcaacatgcaccaacactcctgggagctacttttgcacctgccaccctggctttgcaccaagcaatggacagttgaatttcacagaccaaggagtggaatgtagaggtgagcagagagtttgatggacaatccagaaaagacatttctctttgctcttctgggtttcttgatattctccagttctttgcagatattgatgagtgccgccaagatccatcaacctgtggtcctaattctatctgcaccaatgccctgggctcctacagctgtggctgcattgcaggctttcatcccaatccagaaggctcccagaaagatggcaacttcagctgccaaagtaataatctctttgtatgtcttggcaatggaatctgtttctggctttggttggaaaattctcattctacccaacctcgggatcttcctcttagtgttgcctcatccacatattctgtttctttttcttcttcatccatttactctttcaacaaatgatttttggagtacctattaattaattagttaaacaggaccctgcagtaggcactgaagatttggtcctgaatatcataggcatgcttcttgtcctcttgtagcttatagtctagggaaggagccagaacacacacacacccaattatttaattataactatgaatgaaacaacaacaaaaaagtgtgcttttttttttttttttcacccaggctggagtacagtggcaggatcttggctcactgcaagctccacctcccgggttcacgccattcttctgcctcagcctcctgagtagctgggactacaggcgcccgccaccacgcctggctaatatttttgtatttttagtagagacggtgtttcaccatgttagccaggatggtctcgatctactgacctcgtgatcagcccgcctcggcctcccaaagtgctgggattacaggcatgagccactgcgcctggccaaaacatagtgtgctttgaagtggctaataggatattgattatgctccaagcaaacaacatttaagcagaaacctgaaggaggagaaggacttctctagaggaagaatggagatcatgctgttctgggttatagcagatgcaaaggtcctgaggctcacaccaaatgaggacaaggggaagtggcagtagacatatctgatgaagtggacagaggtcagattctgcagggtcttggtggcttgtgaagaattttgaaagggctggatgcagtgacatacctataaacagcactttgggaggccaaggtgagaggatcacctgaggccaggaattcaagaccagcctgggcaacattgcaagactccgtctccacaaaaaataatgataaaaaattagccaggtgtagtagcatgggcttgtagtcctagctactcaggaggctgaggtgggaggatcgcttgagcctgggaggttgaggctgcagtgagctgtgctcatgccactgcactcaagcctgggtgacagagtgagaccctgtcttttgtttttttttctttttttttttttatggagtctcactctgtcgcccagactggagtgcaggggcgcgatctcagctcactgcaacctccacctcccaggttcaaatgattcttctgcctcagcctgccgagtagctaggattacaggtgcccatcaccacacccagctaatttttgtatttttagtagagatggggtttcaccatgttggccaagctgttcttgaactcgtgatcttgtgatcctcccacctcagcctctcaaagtgctgggattacaggtgtgagccaccgtgcccggccaacctttcttttaaaaaagaatttcagagtcctttcccctccccccaagaataatggggaaccatgaaaggtttaaaactgttaaattatgtattatttattacattaaaaatatgtgtaacttattggaggcaatgaagtataacaagcaaatgaatatatctgatgtatttccaaatataataaagataatatcatcaatgtcgctggttctcctatatgtttcttctccattctatctccttgtatcctccttagacagccacttggaattttgtgtttattatttccctacttaaaaaaatattttcccatggtatgtacccctaaacaatatctgcctagtattgcttgtgtttggagctttgtaaaaatgatatcatactacatatgactatagatgtatgtcttttatatgtatgacttctctaatttgctctgtttcactcaatatcatgcctcttagagtgtaagctgtgcagggacataatattgagtgagaagtcacacatataaaagacatacatccacaatcatatgcatgattgcctctaagaggcatgatattgagtgaaaccgagcaaattagaaaattgtgtgttgtagtaaacacgtccttcatgttgtagtgtgtagttgtggtttgttcattttcccccttgtgtattagggtaatagatggattttaagtcgggcacgggaggacatgaaatcagacttgaattttcatcttattttgctgaggttgaagtttggtttggttgctgttgttttcttcctaggggttctcttcaaatgtaaggaagatgtgatacccgataataagcagatccagcaatgccaagagggaaccgcagtgaaacctgcatatgcaagtattttttaaggttcctagtttttgaggttttcttagaagccatttaggtagaatgttgtttttgcagttctaacaaaggcaaaagtaatagtggccaaaaccagacagcagtttatttttctcctctgtaacctgctgagtgtaagctgtgcagagctcataccatggctccattatgctctgccagcatcaacacaagactcccactttgtggcccaaggtggcagctccagctcctgccctcacatctgcattccagcttgtgggaaggggagaagaggaagtgaaaagtacggtccttctctttaagcgtatgacccagcaccacttctgcttgcacctgattgggtagaaattagtcacatggtcccacctagctgcaagggaagctgggaagagagaatgtttgcctatctaaaacttgaggattctcttaataaaagaacgggagaatatattggagtcttcctgccagtgaaggtgttgatgctgcaactgagtaatgttggtgtgggggtgttacacagccagccaggccaaaaggaatttggacatcctgactgtctaatgaagtcattacaatgagtaaagactccatgacctctttagaaatcaatgtcactattctaaatatgagcttgtaaattggctatgggcttcccacatgccttggaccactgtttttcttttttaattgtggtgaggtacacataacataaaattcaccactttaactattttaaagtgtgcaattcagtggcacttagaccattcacaatgttatgcaatcatcacctcaatctagttctagaaatttttttttttttttgagatggagtcttgctctgttgcccaggctggagtgcagtggggtgatcttggctcactgcaacctccgcctcctgggttcaagcaattcttcctgcctcagcctcccaaatagctgggactacaggcacccaccaccatgcctggctaatttttgtgtttttagtagagacggggttttgccatgttggccagactggtctcaaactcctgaccttgagtgatccacctgcctcagcctcccaatgttctgggattacaggtgtgagcaccgtgctcagccaagttctggaatatttttatcactaagcagtcactccccattctcccctcccactagcccatggcaaacactaatcagctttctgtctctgtggatttgtctattcttgacatttcacagaaatggaatcatgcaatgtttgctcctttgtgtctggcttctttcacttagcatgatattttcaaggttctttcatgctgtagtacatatcagagaactccattcctttttatggctgaataatattccacatggaccactgttagttcatacatttcctcttcttttaatatcactggttgggaacaggccccccaaaatctggccataaactggccccaaaactggccataaacaaaatctctgcagcactgtgacatgttcatgatggccataatgcccacactggaaggttgtgggtttaccggaatgagggcaaggaacacctgcccagcccagggcggaaaaatcgcttaaaggcgttcttaaaccacaaacaatagcatgagccatctgtgccttaaggacatgctcctgctgcagataactagccagacccatccctttatttcggcccatcccttcgtttcccataagggatacttttagttaatctaatatctatagaaacaatgcttatcactggcttgctgttaataaatacgtgggtaaacctcgttcaaggctctcagctctgaaggctgtgagacccctgatttcccacttcacacctctatattcctgtgtgtgtgtctataatttctctagtgccgctggcttagggtgtccccgattgagctggtttcagcaatcactaagtagttttgctatttgtttatgtttgctttttttattcatggaaggaaaaggtgatgtgattctaattctgatcaagtaatgagttttagtttccctgagaattctagagactcaggaattcagagccacctcatatgatgggctttatgggctaatttgtagattacatgcttgggggaatacatcgattcatgctcacaaatgctctttttttttttttctgggacgcaggtctccttttgtgcacaaataaataacatcttcagcgttctggacaaagtgtgtgaaaataaaacgaccgtagtttctctgaaggtaacgattgggtcttttaaattgtgttttgagtttcaaacatcttgggcacactttgggtgcagaaagatgtctttatggctgggcgtggtggctcacacccataatcccagcactttgggagattgagtcagatgaatcacttgaggtcaggagttcaagaccagcctagccaacatgatgaaaccctgtctctactacaaatacagaacttagccgggcatggtggcaggtgcccatagtaccagctactcaggaggctgaagcaggacgattgcttgaacccgggaggtggaggttgtggtgagccaagatagcaccactgcacttcagccttggcaacagactgagactccatctcaaaaaaaaaaaaaagaaagaaagaaatatctctttataatgaatggattgtgaattaatatttaattttttatagctgtaagatttgaaaaattagcatacagtaaaattacctttttacttgtatagtttgatgagttttctcacctgaatagacttgttgaactaccactataattaggatgcagaacagtttaattatctccaaacattcccttgggcttctcctttatagtcagatactccctccaccactaaactctataaatccctgatctggtctctgtcaccagagttttgtctttggaagagtgttatataaatgaaaccacatagtatgtggtcttttgagactggcttctttgactcagcatagtgcatttgagatgcctggatagtgtgtatataaacaatgccatttcctcctcctcctccttcttccttctttcttttccttcctttttactgttaatgagattcagcacattctcattgctgtatataaccatcaccattatccatctcaagaactttctcatctttctcatcttttcagggggacagaattggttggtggttttttttgtttgtttgttttgttttgtttgtttgtttgttttgagatgaagtcttgctctgttgcccaggctagagtgcaatggtgcgatcttggctcaccgcaacctccacctcccaggttcaagcgattctcctgcctcagcctcccgagtagttgggattacaggcatgcgccaccatgcccggctaattttgtatttttagtagagacgaggtttctccatgttgatcaggctggtctcaaactcccgacctcaggcgatccacctgcctcggcctcccaaagtgctgggattagaggtgtgagccaccaagtctagccaaaagctagtttttcttaagctttaagttgaactcattgatattgtcattttctttataaatctggttatttttgtatgaaaataagaataacacttttacttataattgtattaattttaaattaatacatttatttttattcataaagtatacattcatccctagggttttcagattaaattttgataaatgattaatcctatttacaaacttagttcaatttcctcgaatgttttatactatgtttataaatattccaattcccccctcccgctccacccaaatttcaagtacctggtgaagaggatttacaaatctaataggcaaagtcacttgggtcctgagcgactcataaatccaatcgatcgaatctataaatataataattcagattcttttagacattcaatatggtttataaatagccacgttctcttaaattgttcatattaaaataacaagtctaattgctttttgcaataaaattatgtggtttattggttagcttctctaatgtgtcaaactgttccaactctttttttttttttttttttgagatggagtcttgctctgttgcccaggctgcagtgcaatggcgcaatattgactcactgcaagctccgcctcccgggttcatgccattctcctgcctcagcctcccaagtagctgggactacaggcgcccaccaccaagcgtgggtaatattttgtatttttaatagagacggggtttcaccatgttggccaggctggtctcgaactcctgacctcaggtgatccacccacctcagcctcccaaagtgctgggattacaggcataagccaccacacccagccccaactctttaaataggagatgtttctagattatgctaaagatgtcaaaaacttctaaatttaacacaaatcctactaaggatgtttagtttgcctaaaattttctaactttcctgaggatataaaataacttccctagctaagaataaatttaacatatcagaggggcgggatttgaagagattttgccagttgtcgaactgagtactatgtttcctggagatggtcctagttgagatgtttctgctatgtcagtggggaggggagtcccacacccatgccttttggggattacagagctcagggcttcctgtttctcttggacaaatatctctcaaatgtcccgcttaccccgtgtttattgaaatcctttttttccttttatcatctaatttggatagatagaaacttgtattgctgctcaaatttcagtttaatttcctctaccatctgactggatttaattcatttaatgcattttcctgcatttattaggttctggattccttttagttttttttttttttttttttgcttgggtcagagtcacatgtgatagtcaatttattgataataatcaataataaggggaatcatatgaatattactattactattgttgttattgtttttcttaccttaatcctattcctcaaacacatccagtgttaagaggtagataagtatcttcccctatctttttaccttgtaagcatgtacacacatacacacatatacatacatacacatacaaataaacacacacacatatacacacatgcgcacacacatacacatacatacaaatacatacacgtatacacacgtgtacacacacatatacacctcccccacatgcacacacatgcacacacagtatgtacacacatacacacatatacatatgcatatacacatataacatacatacacatgcacacatacacatacaaatgcatacacacacaccccacacacatttacacacatacacacaccccacacacatttacacacatacaccccacacacatttacacacatacacacatgtatacacacatctatgcatgtacccatacacacatacagacatacacagacatctacacacagatacacacatacacatccacacacatatacacactcctgacacacatacacacatatatacatacaggcatatacaaatgtacacacatacacaaacacacatatatacacacacgtatacatacatatacacaaacacacatacatacataggcatacatagacatacacagagatatacacacatgcacacgcatgtacacaacccaacacatacacacatatacacacacccacatatataagcacacacacacacatgcacacacagtgcagtcattttattgagcacttactatgagaggtttaggacagtgattaatgattcagcctctgctgccagactgccaaggttcaaatcgtggttcttccacctgctagatatgagtccttgtttctcctttcaaaaatcaaaataatcataaatagcctctacttcatagatatcttctacaaattaaacaagttaatatataaaagacatttagagcaatacctggctcgtaataagtgtgtgctatttttatttctatatgccagaacataaataccataatataaaattttaaattaaaccaattgtttctaaaccaaatgcaatactatatacatgatactctgtaatttgctttagtgaacagtggctcagagacccttttgcttgttaatgcctataggtatactgcaatattcattttaacagctgtatggctgttatttgatttcatcttcatttattgacccagtctgtagggcatttaggctttccacaaactatcctgagatgaacatcactggacaagatccttgcacaacttttaagtatttctgaaaagattaattccaggaaggggaattgctgtgtcaaagggtatatgcaatttacatggctatgggtacaaacttactgcattgcataaaggttacatcaatttgtctttcttgcttgctttcttgctttcttttgacaagatctcactctgtcacccaagctggagtgcagtggagtgatcatagctcactgcagccttgaactccagggctcaagagatcctcccacttcagcctcctgagtcgctgggactagcgtcatgcaccaccgtgcctgctcttttttaatttgtttgtacagatggggtcttgttatgttgtccaggctggtcttgaattcctgaacttcaatttgtatttctttttttttcttttttcagacagcctctctcactgtcgcccaggctggagtgcagtggtgcgatctcagctcactgcaagctctgcctcctgggttcaagtgattctcctgcctcagcctcccaagtagctaggattactggcacgtgccaccatgcccggctaaatttttttgtatttttagtagagacagggtttcactatgtttgccaggctggtctcaaactgctgacctcatgatccacccacctcagcctcccaaagtgctgggcttacaagtgtgagccactgcacccggcctgaatttgtatttctgatggggcttcttgaatcagaaaaaggagcccgagtggatgccccttttaattctcctttggatggactcccagcctattcttaatcagaaaagggacagctgttatttcattaatgagagagagagagagaatgaacaaacacatctttccttgcagaatacaactgagagctttgtccctgtgcttaaacaaatatccacgtggactaaattcaccaaggaagagacgtcctccctggccacagtcttcctggagagtgtggaaagcatgacactggcatctttttggaaaccctcagcaaatatcactccggctgttcggacggaatacttaggtaggagacaccctttgtggcaaggttacacctaggggatgattttgaaagttgactttggcaatgggatattccctgggtttcccacccattctttccccaactgtttaaaaactttgaattcacagcaaagcaagtctaatcatattaacaacattttccattcactgagtgcttggcaaaggccaggcactgtgctaagaccatatcattaatttattctacaaatatttgctgattagctgctatgtgctgggctaaggtatgacagtcataggctgtgctcaagtacttcctgtttgccctgctgggcccatggtagaattgtacttcctggctactgtgtggttaggtgggatttggggagtagctcaggccaataaatatgggaatagagtagttgcaggtatgagactttccagaactttccctctgcccatatgaataacagtgcttcagatcacagctgctccttctgcctgggtcccagaataaagacaatatagaacatggcctcaagtcaatttacaatagacccaaagcattaatgagatgtaaacacttgttattttttaatccactaagacttagggttgtttgttactgctgcaagactgatcctttcctgactgatacatacttgatagataactacttgggaatagtggttgctgtagatcttttacattagcaccccactcctggtagtagttccagtatcattcacataaacctacgaagttcctacctaatggatgcccagacggccaagaggtggaaataaagtatttggtggactccaaccagtagtgaacaaaattagcctcatgaatctcatattttagtgagttgagtcagataataaacaaacagacatctggtataccaaatagaggtagcactattgagaaaaagtacagcaggctagggaggttagagagggttgggattacagggagagttgctattttatatagcaagatcagagtaagtctcattggggcagggatgtcagggaagagagccacgtaaatatctgcagaaagagcaagtgcaggaatacctggagaattcaaggaacaatgaggtgcacagtgtggctgaagtggcattgaagatggtgagagcagtaggagaaaggaagggagatggaaatgtagataaatgtagggagttaaggttttttttttcttgagacaggttctcactctgtcacctaggctggagtgcagtggtgtgatcatagctcactacagctttgcactcccaggctcaagtgatcctcctgcctcagcctcctgagtagctgggaactataggtgtgcaccaccatgcttgtctagtttttaaaatttttggtagaaatgaggtcttgctatgttgcccacgctggtcttgaacttctgagctcaagtgatcctcctgctcggcctcccaaagtactaggattacaggcctgaaccactgtactcagccaagattttatttgaagatgaaaggacattggaaaatttgggaacaggtatggtattatctggcttatattttacaaggatacttcttgttccattatctagtttattttcatgaagggccagtgggttaggtcctgcaatgcttgtcatgatagagatgagaaattggaggcacagagaggttaagtcaatgcgcaaatttaggcagctagtgcgtggcagagctggacctcccagttaccaccatctgactacagaacctgagctcttgtgtaccatgctaggcttgccccaatcccttactatttcttttggttttagaaaacttatataaggccgggggcagtggctcacacctgtaatcctagcactttgggaggccgaggcaggtggatcacaaggtcaggagatcgagaccatcctggctaacacagtgaaaccccatctctactaaaaatacaaaaaattagctgggtgtggtggtaggcacctgcaatcccagctacttggaaggctgaggcaggagaatggcgtgaacccgggaggcagagcttgcagtgagccgagatcgtgccactgcacaccagcctaagtgacagagtgagactccgtctcaaaaaaaaaaaaaaaaaaaaaaaaaacttagagagaaaatcatgactgttgccttccatcactgttgactttgaccccatctttccctgatgcaccccctaggagatgagagttcacttctaaggctccagctgggttactcatttatttggtgctatggtccccctatcattcatcatgggcctcaagatctttcctatgatgaattgaactttctattcttttcctttgctcgccatgatggaggtgtacctttttttggacagaaaccaaattcaggactgactttctgggtgacctcatacgaactctccctttctctttttagacattgagagcaaagttatcaacaaagaatgcagtgaagagaatgtgacgttggacttggtagccaagggggataagatgaagatcgggtgttccacaattgaggaatctgaatccacaggtacaggtcctctcctgagaatgcaggttatggtgtattccatcaataagtatttatcgatccctttctaggtgccaagaccagtgccagatagttgagaaccaatgagggtagaaatggtccatgctctcagagagttttccatgtgctagggaagtcaaacattaaataaccttataatactggagtactgagaccttcactggcctatatgatatgtgctggtcacattctgctgttgagcagttgaaatttgtataagccaggttgagaggtactgtaaacctaaaataaacactgtatttcgaagctttgttgcacaaaaagaaggattaaaacgtctcactcatcttttttatatttaaaataatttaaaaataaaaaatatttaaatttttaaaatatgtaatatttaaatttttaaaatatgcaatatttaaaatatatctttaaattttaaaatatcacatttatatgttgaaatgataatatttggcttatactgagttaatatattattaaaattaattttatctttttttacttttaaaaaatgtgtactagaaaatttaaaattacatatgtggttcatactgtatttctgttggacagtgctaatctgtgtcagggatggcaaactttttctgtagagggctcgttagtaactattttaagcattgcaattaatacagcctctatcacaatgatttaactaccattctagtgcaaaagcatccatagacaatatgaatatgaatgtgcctgggcatgtttcaataaaactttatttaaaaaagtaggtgacaaccagattggcccataggccacagttttccagcccctgatctgatctatgcatacgattaatgctatgattaatactttaatgtaaaagcacagtgtgcaatatggaagagctatttaagcgaagtcctgaggaataggtagagaaagcaggagagagtgtgttacaggaagtataagctatggctctgtgttgaaaaaaagcttggtatggtcatggaactaaaagtagagtgggctggagcatcaggaatgtgggggagagagggaaaagaattgagggtcgctgggcgtggtggctcacacctgtaatcccaacactttgggaggtggaggtgggtggatcacctgaggttgggagttcgagaccagcctgaccaatatggtgaaatctcatctctactaaaaatataaagaatgagcctggtgtggtggcgggtgcctgtaatcccagctactcaggaggctgaggtaggagaattgcttgaacctgggaggtggaggctgcagtgagctgagatcgcgccactgcactccagcctgggtgacagaatgagactccatctcaaaaaaaaaaaaaaaaagaattgagggtgttgcatcccagtttattacatttggactttctctgttgggcacagaaagccttggaaagttctgtatacagcaggatgatctgattatgtcttccagatagatgtctttttagaaataaatcctctggctgtgatatgggcaatccattggagaggtgaggctaggggaaggcaaggacatttgtgaggaagccagtggtctgggagagagatgtgaggcttggtctaaggctaattagaagggagaagtggggagaagacaggttcaaggcacattaaggaggaggaatctgttttgcggggagaagaattcaaggatgactctccaggttccagatcaggtaatatcagttattgaagtaggagatgcagataaaagaagatgagagagccaggcatggtggctcacgcctgtaatcccagcactttgggaggccaaggcgggcagatcacctgaggtccagagttcaagaccagcctggccaacatggtgaaaccccgtctccactaaaaatacaaaaaattagctgggtgtggtctcgggtgcctgtaatcccagctactcgggaggctgaggcaggagaatcgcttgaacccggaaggcagacgttgcagtgagccgagaacctgccattgcactccagcatgggcaacagagcaagactctgtctcaaaaaaaaaagaagatgggagaggaattgctcaatttatgatgtctggggggacatccaaggggcagatgaagcctgggggttggtactgtctggttgggacaggaagcggcataggacgtatccctggagaccgtccatatttaaaggggacactccccaaagagactgaaacagaataaccatagatgtgggagaacttatttcccactgagttgcattgtcccttaaaaacacaagttcaaatttatttttaaatgtagccaagacttctccaggtaagagcactgggaggtctgttttgttttgttttctttttttgtcacccaggctggagtgcagtggcgggatcttggctcattgcaacctccgcctcccaggttcaagcgattgtcgtacctcggcctcccgagtagctgggactacaggcacctgccaccacgcctggctagtttttttattgttagtatagacaggatttcaccatattggccaggttggcctggaactcctgacctcaagtgatccacttgccttggcctcccaaagtgctgggattacaggcgtgagccactctgcccagctgtggaagtttttattttgttttgttttgaaatggagtcttgctctgtcactaggctggagtgcagtggtgcgatctcggctcactgcaatctccgcctcccgggttcaagcgattcccctgcctcagactcccaagtagctggagctacaggtgcgcatcaccacgcccggctaattttttgtattttagtagaaacggggtttcaccatgttggtcaggatggtctcgatctcctgacctcgtgatccacccgccttggtctcccaaagtgctggattataggcgtgagccaccatgcccggccagaggttttttttttttaatggttctagaagcccgctggttattttaatctcagagcagcacggtgaggtgcatgactctctctctctctctctctctccccctccctccctctgtgtgtgtgtgtgtgtgtgtgtgtgtgtgtgtgtgtgttgggtcttctataataacaattgagcaaacgattccttcctttttttcatttggggaaacctgcagagaccactggtgtggcttttgtctcctttgtgggcatggaatcggttttaaatgagcgcttcttcaaagaccaccaggctcccttgaccacctctgagatcaagctgaagatgaattctcgagtcgttgggggcataatgactggagagaagaaagacggcttctcagatccaatcatctacactctggagaacattcaggtttgtgaagaggtctctactgagattcttgtctacctgttgggaactcctcgtctctcgattgccttaactctcattttttacgggaagctattgaggccggtaagcttccacaatttccagcaattcaagccaattaacagaagctaccgctagaggaatgaggtctcccactgtcaccaaacagaactaggtccatttgcccatgtgcaacagaaagccaaacaccgaagcaccgggtttttgtagagagagaagtttattgcaaggctgccaagcaaggagacaagagtctggctcaaatctgtcttcccaagctgggaggctggggcaggttttatagtcggtgggtaatgaactgcaatctgattgcatcttacaatgaagtgatgcagggaggtgtgatctgattggatccggccatggggtgttgccaggtcttgatctgattggatcctggatcctgctatgtggtggttgcttctttttttttttttagtctcactctgtcacccaggctggagtgcagtggcacaatttcaagtcattgcaagctccacctcccaggttcacgccagtctcctgcctcagcctcccgagtagctgggattacaggcgcccgccaccatgaccggctaattttttgtatttttagtgcagacggggtttcaccatgttagccaggatggtcttgatctcctgacctcgtgatccgcccgctttggcctcccaaagtgctgggattacaggcatgaaccaccatgcccgcttttttttttttttttttttttttgagatggagtttcactcttgttgcccaggctggagttcaatggtgcaaccttggctcactgcaaccctcacctcctcgggtaaagccattctcccgagtagctgggattacgggtgcccaccacatgcccagctaacttttttgtatttagtagagacggagtttcaccgtgttgctcaggttggtctggaactcctgagcttaggtgatccacccgcctcagcctcctgaagtgctgggattacaggcatgagccaccgtgcccacccttctaggatacattcttaaagcatgttgttcttaaactgttactaaaaatatttctctgcttacttggtttttatgattttttctcccactgcactatgatctctttttgggggaagaactgttttctcatgtctcctgtaaacagcacagatcaaggcatgtaataggtgttcaataaaaacacgttgaatgaggctgggtgtggtggctcttgcctgtaatcccagcactttgggaggtctatgcaggaggatcacttgaggtcaggagttcgagaccagcctggccaatatggagaaaccccatctttactaaaaatacaaaaattagctggatatggtgacacacacctgtaatcccagaactttgggaggcccgaggcaggtgaatcacttgacatcaggagttcaatactggtctggccaacatggtaaaaccccgtctctactaaaagtacaaaaattagctaggcatggtggcgggcacctgtaatcccagctacttgggaggctgaggcagaagaatcgcttgaaccccggaggcagaggttgcagcgagccgagactgcaccactgcactccagcctgggcaacagagtgagactctgtcacacacacacacacaaaccacacattcaatgaataagtgaataatgagtgactatgcagaaggctttattatggatttgatgaaaggaggagttttcttctagcaacagcaatgtgagctgccctatcagattggccctcactgcataatgaaataccagcatttttccccattccctcagaacataccctgtgtattcttgttcccagtgactcttgaggatggtcacatttaatccatttgatggggattcccagaagacctttgtttttttgtttttttgttttttttagccaaagcagaagtttgagaggcccatctgtgtttcctggagcactgatgtgaagggtggaagatggacatcctttggctgtgtgatcctggaagcttctgagacatataccatctgcagctgtaatcagatggcaaatcttgccgttatcatggcgtctggggagctcacggtcagtactgatgatttgttccctgaggcagagtatctgcctccaaatccaatgggaaaatattgattaaacatctgttgtgtgtctcccatggggttgggtgttgtgggatggagtcacggggacagaaggggtaggtgatatgcctttgcccctgcagaatttacagtctggttgggaggccatgaaactcaaatatacaatgagaaataatgaccctaagtagggccaggcactggagcaatcacagatcttacttaatgagcacatacagtgtgctgggctctttaagttaagtggttttagacccatttcacagaatgggtaaagtggcccgtctagtcctgaagctagaaattggagcaggtggaattcaaatctggggaagtctctttccactaacacatgcaaatgggtcaagaagaaatgctgtaagaattcagaggtgttggccgggtgtggtggctcatgcctgtcatccgagcactttgggaggctgaggcgggcggatcatgaggtcaagagatcgagaccatcctggccaacatggtgaaacccccgtctctactaagaatataaaaattagctgggcatggtggtgcatgcctgttgtcccagctacttgggaggctgaggcaggagaatcgcttgaacctgggaggcagaggttgcactgagctgagatggcaccactgcattccagcctggcaacagagtgagactctgtctcacacacacacacacacacacacacacacacacacacacacacacaaacaaaaagaattctgaggtgtttccaagagagccgatgatagatcatgaggaaacaatatgaaataagccttggtaaatgagtagatttggaagagaggaaggacatcctcattagtgttgtagaaagtatcctttcacctggctcggtggctcacgcctgtaatgccagcacttcgggaggccgaggtgggcagatcacaaggtcaggagatcgagaccatcctggctaacacggtgaaaccccatctctactaaaaatacaaaaaattagccgggcgtggtggcgggcacctgcagtccaagctactcgggaggctgaggcgggagaatggcgtgaacccgggaggcagggcttgcagtgagctgagatcatgccactgtactccagcctgggtgacagaaccagactccgtctcaaaaagaaagaaagtatcctttcctatcatggtagatccaaggtttaattccctaccagagaggccataagtaagtgccatttcgaggaccctgtggcttaggatttaagagaactggatccagaacaaaactgacttagtttcaagtcttgtctctaccactttctagctgtgttttcttggaaaagtcacttaacttctctgcactgagcccagctctctcatctcaaaaatgagaacaacaataacaaaaaaatactgataactagtatttatatagtatgcttctggcacagttgtacttgaaatgttttcatttaatcctaaaacaactctataaggcaattgccattaatattctcttttcaacagatgaggaaactgagggcacagagcagttaagtgtcttgtccaaaatcacacaactagaaattggccagtttttttctttctttttctttttcttttttctagactgagtttcactcttgttgcccaggctggagtgcagaggtgtgatctcagctcactgcaacctctgcctcccaggttcaaccaattctcctgcctcagcctcccatgtagctgggattacaggtgcccgccaccatgcctggctaatattttttgtttgtttgtttagtagagataggatttcgccatgttggccaggctggtttcaagcttctgagctcaggtgatccacccgccccagcctcccataagtgctgggattacaggcatgagccactgcgcccagccaatggtcagttttcttaaccactttgtgacaatatcatagagaggtgctcataagatggtgcctggcttatctttaacccacagaaaccactcagagacatttaaaattaattttaaaattaattatgaataaatggcatagaagaaggacttagcttgtcacgttccactcctgaagttgaagcattcctgaatgtctgcattatcagttgggattcagtacaggaagcaaaaaccaccccaggtatttcaagcagaaaggcatttaacacagggaattgggtgctcacaaaaatctctgggaggggatggaggagttgaagtcagggggctgtcacttcaattttggcttcaaggtcatcccccaatgcagctgtaactcagaggtcagaaattgctgctgtcattttgccaccccactccaccatgaaattggggactggacagttgaaatgtggaattaggctcactcctgtctgccgaaagctgatatttgcctcccttctgcattccaaaaccttcacagatgtatctcactggagaacttaaattacatccaggaccttagttccaaaggattctgggagatgtagtttgtggacatcaagccccagtaatacatggagtaacgcataggacaggactgggaataggtgctggtggatgccagtggattgcaaaggataatgaaggacagtatctagttcactctgagtgttagagggagaaaattcccccaagctaattttgcccgagccagggttttagataactcttcttcccgcctggggggattttgatcccattctcaggccaactctgaaattccttcctgacagatggacttttccttgtacatcattagccatgtaggcattatcatctccttggtgtgcctcgtcttggccatcgccacctttctgctgtgtcgctccatccgaaatcacaacacctacctccacctgcacctctgcgtgtgtctcctcttggcgaagactctcttcctcgccggtatacacaagactgacaacaaggtctacatcgctcgggctgtgtccccaccaagccccatcttctccccacctgcctcagctcattcctagccaactccctctatccctgttcctacctcagggcctttgcatatgctgtgccctctgcctgtaacactcacttcccagcttcttacctgcttgactccttgtgacagctctcagtttaaacttatgtccctgatcgtgttatgaattatagtggttcctcctattacttgtttttgtttgtttgtttgtttgtttttgatactgagtttcgctcttgttgcccaggctggagtgcaatggcacgatcttggctcactgcaacccctgcctcttggttcaagcaattctcctgcctcagcctcctgagaagctgggaatacaggcatgagacactatgcccggctaatttttttgtatttttagtagagacggggtttcaccattttggccaggctagtcctgaactcctgacctcaggtgatccacccgccttggtctcccaaagtgctgggattataggcttcagccatcacgcacggcccctcctgttactttctaaaccagaggttctctccctgggtgctttttgtccccaggggagacttggcaatgtctggggacatttttccttgtcacaactggagcagcgtgctactgctctctggtgggtaaaggttagggatactgctaagtatcttgtcgtgcccaaggcagccctccacggcagagaatgactctgcaataatgttacagatgtcgataatgctacagtttagaatctctacttccctttatttttcttttctttttttaaatttttaatttttttagtttttttgagacagggtcttgctatgtcacccaggctagagtgcagtggccgaatcacagctccttatagcctaccaggctcaagcgatcctcccacgtttgcctcccaagtacctgggaccacaggcctgtgccaccatgtctggctaatttttgtatttttgtatagagaggggggtttcatcatgttgcccagtctggtctcaaactcctgggcttgagcgatctgcctgcctcagccttccaaagtgctgggattacaagcatgagccaccacacccagccagtaaaactttatttacaaggcaggcagccagcctatggggtctagtttgctgaacccgcctgttttcaaccattccctaaagtagggtgatcgacaatcagttttcctaaaactcttcctgttttagaactgaaagtcatgcgtcttgggaaatcttaggtccagacaaaccaggaccatgggtctccttaccaagaagtgctcctccctgtggtcaagaaccactgcacctctctataaatgtttgtgagatgaatgagtgagctaggtttggggaatttccagccgaggagtctctctcttcctttcttcctttcgatttctctctggggtggaggattctgatgcgcatgcttctcccctccagatgggctgcgccatcatcgcgggcttcctgcactaccttttccttgcctgcttcttctggatgctggtggaggctgtgatactgttcttgatggtcagaaacctgaaggtggtgaattacttcagctctcgcaacatcaagatgctgcacatctgtgcctttggttatgggctgccgatgctggtggtggtgatctctgccagtgtgcagccacagggctatggaatgcataatcggtgagtgacatcctctctcttcctgaagaccctgctgccagggcttatggtgataatgacatgagcaacaagaagagtaacaacagtagcagtagttgtggctaccatttatcgagctcttctattatgtactattggtttcaggaccaccatgtacagcagcatgggttgtgcactgcacaaatccaggatcactactatttgaggtttatgttccaggaagagaacatctggtttacctaacttgattattttccttttcttgcgtgtatgacatggggggtggtgggggtgaaagtgggaaaggaatacttctgcatggtggtgtgcacctgtaatcccagctactcgggaggccgaagcagaagaatcacctgaacccgggaggcggaggctgcagtgagatgagatggcatcattgcactccagcctgggggacaagagcgagacttcatctcagaaaaaagtggggggaatattggggtgctgttattgaacatgacggaatggttgttgtgttgtaaaagcagctaatgtacactagagacataataaaaggagccaatcctttcttcctccctcccactctccctccctccctcctcccttcttcctccctcccctcttccctccctccttccttcctccctccctccctcccttccttccttgccttccttcccttccctccctccctctcttcctcccttcctccctcccttctttccttctttccttcctttcttcgaataaacaattttatgaaatatcttgtctatgctaggctgtgctctgagtgctgagtattcagagatgaacaaacacctaaggcccaaattctcatgaaactcatagtctagtagtggaagacagtttgcagttacacaagcaattaaacaaggtaacttacgatagtgatagctgctgttttaaaaatgcagtgagctctgctagatggataccaggagcagagacaggttgccctatctaaggatagtcaggagtggcttctcagaggaggtgacatttgagctgagatttatttatttatttatttatttgttatttatttatcttgagacagagttttgctcttgtcacccaggctggagtgcggtggcgtgatctcagctcactgcaacctccacctcctgggttcaagcgattctcctatctcagcctcccaagtagctgggattacaggcgtgagaccccacgcccggcctgagctgagatttgaatgataaggtgtaccagtggagagttctgcatagagggaaacaggattacaaagttgtgaattgggaaatgagctcaaccttgggcactaggtaaacatttcaggtacatttgcccaggaagaaggtctaaaagaggaagcgcagtgatctaaaggaaactgaactgcaaccgggaccatcctgagcatcatctgagtctcacctcccagtgttctcctccactagggcatttgttgggacagggttaactgtaaggtcaggactctgagacaagcgctgactcctcctatttctctccacagctgctggctgaatacagagacagggttcatctggagtttcttggggccagtttgcacagttatagtggtaagcaaatactacaacagcctggcgaagtgtgttctgaaggaggagcaaggagacctgcgagatctggaatttccagggacgtgtgcagctgagagggtcacttattcccatcaaaagttctcctttccaggccgggcgtggtggctcacgcctgtaatcccagcactttgggaggctgaggcgggtggatcacctgaggtcaggagttcgagaacagtctggccaacttggcgaaaccccatctctgctaaaaatacaaaaaattagctgggtgtggtggcgagcacttgtaatcccagctacttaggaggctgaggcaggagaatcgcttgaatccaggagacatggaggttgcagtgagccaaattcatgccactgtactccagcctgggcaacagagtgaaactccgtctcaaaaaaaaaaaaataaataaataagttatcggccaggttgcggtggctcatgcctgttatcccagcactttgagaggcccaggatcacttgaggtcaggagttcaagaccagcctgaccaacatggagaaaccccatctctactaaaaatacaaaattagctgggtgtgttggcacatgcctgtaatcccagctactcaggaggctgaggcaggagaggagaattgcttgaaccagggaggcagaggttgcggtgagccgagattgcgccattgcactccagcctaggcaacaagagcaaaactccatctcaaaaaaaaaaaaaaaaagttctcccttccaatccttcattcttgagatttcgaagttacagagtaatttctttgacttgggaattttgtttttccttctgaaaggcaaatacccctgggagggaccataattgtatccgtcttgtgcacaggtccatgagtctctctgaagcagtgtcattgtctgggggtaataatgcctgaggttcgttgcctcatgctaaggaaatcaaggacacagacacacacaaggagtgagtttaagagcagaggtttaataggcaaaagaaagagaaaggagactagctctctgtgtcttgcaagagagagggcctcctgagtgggacttctggcccgcagcaaagtgcaacagattttagactggcttgagggggcggtgtctgatttacatagggcccaaagattggttggacccagtgtgacatttacgtagagcgcgaggaagctggccacccaccctgatcttttattatgcaaatggggtctttacttggctggcaccatgttgtcttctccttactgtctacatggtttacaaagaaaagggaagacggagctgccattttttttttctttttttttagacggagtctcactctgtcacccacgctggagtgcagtggtgcaatctcggctcactgcaacctctgcctcctgggttcaagcaattattctgcctcagcctcccgaatagctgggattacaggcacgcaccaccacacccggcaattttgtatttttaatagagatgggttttcaccacgttggccaagctggtctcaaactcctgacctcacgtagtttgcctgcctcggcctccccaagtgctgggattacaggcatatgccactatgaccagctaatttttgtacttttagtagagatggggtttcaccacgttgaccaggctcctaacctcagttaatccacctgcctcagcctcccaaagtgctgggatttcaagcgtgagtctctgcgcccagccagagctgccattttgaacatgcctattccccaggtaaccgctttcctattggcacaactgccagcattcacccatgcaagcttctagcttgcctttctatgtctatagctcgattctaccggctgctctccattagaaaagaaaatgatttgggagctgcttttcattaaaaggaaaaccttaccgaggacttccttaccctcactatctgcctaaataaatcttttttaaatcctatgtcatctcctaggcacagatgttgaatgaaagaaaaagtaaaaagaaattaggaggaattgtgggggaaggagtgagatgacagagggaaatggtggatcgaggcaaagggaggccagggaatgttaaacacccatctctttgcctcccaacctccatccagacttgacagccctgccagatgatgattcttctgactctcactcatggtggctcattcccttatgtcttttgtcatatttttcgaggattaaatttttttttatttttaatttttgtgggcacaaagtaagtgtatatatttatggggtatatgaaatattttcatacaggcacagaatacataataatcacatcagagtcaacgaggtatctgtcccctcaagcatttgtcctttgtgttacacacaatccaattatgttcttctggtttttgttttgttttattgtttggtttatttttatttttattttgagacagagtcttgctctgtcacccaggctgcagtgcaatggcatgatctcagctcattgcagtctctgcctcctgggttcaagcgattctcctgcctcagcctcccgagtagctgggattacaggtgtgcgccaccacgcccagctaattttttgtatttttagtagagacgggatttcgccatgttttccaggctggtctcgaattcatgacctcaggtgacccacccgcctcgacctcccaaagtgctgggattacaggcatgagccactgtgtccagcctctcctggttatttttaaatctacaatgcaattattattaactatagtcaccctgttttgctaacaaatactagatcttattcattctttctatttttttgtacccattaaccatcccctcttccctgttccccacccaccccttcactatccttcccagcttctggtaactgctgttctactctctagctccatgagttcacctgttttaaatgtttagctcccacaaagaactgagaacatgtgaaatgtgtctttctgtgcctagtttcatttgtaatgtttacttgactgatctaagtcttgggaatgcttgaaattatattcctccacagaggttttgtgctgatgtctatcagattttttttaatggggggcatgtattaattttcaggggtcaccgtaataagctactgcatgctgggtggcttagaacaacagagacttgttgtttcacagttctggaggcttgaagcctgaaatcaaggtattggcagggccacgctccccatgacaacacgagggagggtctgttccagacccctctccaacaaattttcccatttgtaagatcaccggccaggtgcagtggctcatgcctgtaatcccagcattttgggaggccgaggcgggtggatcacctgaagtcaggagttcgagaccagcctggccaacatggcaaaaccctgtctctactgaaaaatacaaaaaatgagccaggcgtggtggcaggcaccaatagtcccagcctcgggaggctgaggcacaagaataacttgacccctggagggagaggttgcagtgagccgagataacatcactgcactccagcctgggtgacagagggagactgtctcaaaaaaaagaaaaaaaaaaaggaacactagtcatatttcagtcagattagggtctgccctaatgagttcatcttaacttgattatttctgtaaagattctatttccaaataaggtcttggggcgcctggccccaacagacagcctcttaagctcgttaagaaaataaaaacaaatcttcagaggccataaattagacagcagtaatgaaccagaatgctgtagctgccctaagggtatttcctaaaatcaagaatctaaaaccttggagattgaatggtcatttgtggagttggatgggcaagccctagggtctgaagaaggtgtagagtccaccaaataaaataaagaccccattcttattgaaagggtggactagaaaataaaattctgggccgggcgtggtggtttatgcctgtaatcccagcactttgggaggctgaggcaggcggatcacgaggtcaggagatcgagaccatcctggctaacatggtgaaaccccgtctccactaaaaatacaaaaaatcagccaggcgtggtggtgcacgcctgtagtcccagctactcaggaggctgaggcaggagaatggcgtgaacctgggcggtggagcttgcagtgagccgagatggcgccactgccctccagcctgggtgacagagcaagacttggtctcaaaaaataaaataaaaataaataaataaataaatttaaaaggctatctgttggggttcctccagcatttttggtgttttgtagcgagagggattttcagagtgagattcctaaaactcaaagttgatcctgatgctcttctgtgtgaaactgttctatagcttctccattgcactcagggtgatgtccactccctgagcctgacacctcagatccttcactgcctggccctacccaacttccctagggtccctttctggctttttcctgcctgctcggccctctggctgtaccagccaactttctacttccttgaaatgccaagttctcccctctagacctctctcatggaggtggtggtgatgatgaacaaaccatatgtgtgagatgcttagtacaatgccaggcattgccaagagtgcagtaaatattaggtatgaacaatcatggaaataataattatgatgatgttggccagacatggtggctcatgcctgtaatcccagcactttgggaggccaaggcaggcagatcacttcgggtcaggagtctgagaccagcccggccaacatggtgaaaccccatctctactgaaaatacaaaatttagccaggtgtggtggcccgcgcctgtaatcccagctactcaggaggctgaggcaggagaatcgcttgaacctgggagacagaggttactgtgagccgaggttgcgccattgcactccagcctgggagacaagagcgagactccgtctcaataataatagtaatgcaatgtttatcttacccattcccaaatcttcaaggacattgggctttcttggaagttctactcatctggaaaaaataattcccctggggccgtgattctccactggtgcagttttccctctaaggggaagttggcaaagtgtgaagactttttttttttttttttttgagacagagtttcgctcttgttgcccaggctggagtacaatggcatgatctctgctcattgaaagctctgcctcccaggttcaagcgattctcctgcctcagcctctgcggtagctgggattacaggcatgcagcaccacggccagctaattttgtatttttagtggagatggggtttctccatgttggtcaggctggtctcgaactcctgacctcaggtgatccacccaccttggcctcccaatgtgctgggattacaggcatgagccaccgctcccgaccagaagacatttttggttgttacaactagagaggtgggttctactgccatttagtgcatagaagccagggatgctggttaacatcctaccgtgcacaaggcagcccccttctccccgctgcccccacacaccaagaatgctctgacccaaatgtcagtattgccgtgggtgaacaggccctgcgccaggtgtatgtatatcttgctcaggaatgcttttgagggagggctttagaagataaactcaagataataaactccactcaagttcgcagtctatgtcctaacgtactggatgcactttgggaaaatacacagagaccgccccattgagaacaagcaaaggctgtttattccgagatttctgtagtccagtagtacgagagtcagctaccatcatcactcgcgttggctcagactcaaaggcaggcagagaagtggggaaggtttatagaggaaaaaaagagaaggctacaggtaagtcctgcttggaggctgttgcacggatgggcaagctgtaggtggctaactaggagcggggtatcctgtgtgattggttaggggtacctattggcttctacctgttggtcctaagttggaagtagggacaaaaattaaggaagctgtcaattactaactaagtcctgctgtcttggttcaattgctgcatggatcattctttggctttctggattggttgctataaatcgtgggtcagaattcttcttcttcttcttttttttttttttttttttgagacacagtcttgctctgttgccaggctggagtgcagtggcacaatctcagctcactgcaacctctgcctcccaggttcaagtgattctcatgcctcagcctcccaagtagctgggattacaggtgtgcaccaccacacctgcctaatttaatttttgtattttttttttttttttgagatggagtctcactctgttgccaggctggagtgcagtagcacaatctcagctgtctgcaacctctgcctcccaggttcaggtgattcccctgcctcagcctcctgagtagctgtgattacaggcatccaccaccatgcatggctaattttttttttttttttgtattttagtatagacaggtttcaccatgtttgccaggctggtctcgaattcctgacctcaagagatccgcccgcctcagcctcccaaagtgctgggattacagacgtgagccaccacgcccagcccagagttctctttttataggtgttctggcccttgtctatttgtatatccagtctctccatccttctgcttgactttgcagatcaactcccttctcctgacctggaccttgtggatcctgaggcagaggctttccagtgttaatgccgaagtctcaacgctaaaagacaccaggtaaagccctctttcacctccccccctcttttaatttcctctttcttcttcccagaaaagttctttgagcacttcttgtgtgctgggtcctatgcctgagacagaggtgatgaggtctgtttagcatatcacaccatctagatctggaggcttaaagtccagctcaactatttacgagctgtgtgaccttaggcaagttacgtaacctctcagaagcccatttgcctcacctacagaatggggatattaacattgcttattttaggtgccttacaaagcatttagcacggttactaggaacagtgagtgtttcatatactacaactcttaataaattttctaatttttctctgtgtatacttatatgtgcacatttacaagaaactgaatcatactattttgttttttatggttttttttctctcgagaatgtcctgatgatttctgacttcattagatattattctacaatatggtgtaaatttgtagcacattgtatttaagtcataccatattcatggacacttaatttgcttctatgtgtttttggttttggtttgttctctgtataaacaatactgccttgagcacccttgtaggtaaatccttccacaccatggttatttaattacaacactaaacatgaaactacccaaatccaactgcctgaagagtaggttggactgtaatgcttttagaatgtgcgtcgtaaattgattttcagaaaatttgtttccgacggtgagaatacctatttacttgcaacattgtcaacactggagtttattgtttttgatgtattttctgctgatttaatgcgtgaaatattctatctcattacttttgttatacatattttatattagggatttgggacttcttaaatatttttacaggtcaattgtgtttcctaacttccccactcaactactgttcattttaagaaacttcagcaaccatcatctaggttttattgtcagtaacctaataacattctttgcttcttttttcttcggtatccaatcccttatccattttaaatatgtttgaaaagttagtacaaaagtcaaaaaggaggcctggtgtggtggctcatgcctgtattcccagcagtttgggaggctgaggcaggtggatcacgaggtcaggagatcgagatcatcctggctaacatggtgaaaccctgtctttactaaaaatacaaaaaattagccgggcatggtggtgggcacctgtagtcccagctacttgggaggctgaggcaggagaatagcttgaacccaggaggcggagcttgcagtgagccaagatcacgccactgcactccagcctgggtgacagagtgacactccatctccaaaaaaaaaaaaagacaaaaaggtaaaacaaagttgatacatacacatactcatagcagaaaatgtaagcaataagtttcacatcagatgaaattcaccattttaaccattttaaagcgtgtaactcggtggcttttcgtacattcacagtgttgggcagtgaccgccactatctagtggcaaatccttgttttttttttttttttgagacagagtctctctctcgcccaggctagagggcattggcacggtctcgactcactgcaacctccgcctcccaggttcaagcgattctcctgcctcagcctcctgggtagctgggattacaggcatctgccaccgtgcccggctaatttttctatttttagtagagacgggttttcaccatgttaaccaggctgggctcgaactcctgtcctcaggtgatccaccagccttggcctcccaaagtgctgggattacaagcacccaccaccacacccagctaatttttgtatttttagtagagatgggttttcaccatgttggccaggctggtctcgaacttctgtcctcaggtgacctgcccacctcggcctcccaaagtgctgggattacaggcttgagccaccgcacccagcctgattgcatttaaatgtctataggatttgattttgcaacacctaggcttggagaccccaccctacatttgtccacacctaggtggcaaattggagagtggccacctcagaccattcctggaagtgtggcctgcaaggacaatagccacctcccagagccttacatgctgtacatcttctccccaggttactgaccttcaaggcctttgcccagctcttcatcctgggctgctcctgggtgctgggcatttttcagattggacctgtggcaggtgtcatggcttacctgttcaccatcatcaacagcctgcagggggccttcatcttcctcatccactgtctgctcaacggccaggtgtgtagctgctgccctccccatccccctcctcccatccccctctccccccttccccaccgcatccctccacccaacatccctgtcactggaccatttccctgcatctggatgatgtgtctccttctccaggtacgagaagaatacaagaggtggatcactgggaagacgaagcccagctcccagtcccagacctcaaggatcttgctgtcctccatgccatccgcttccaagacggtgagagactgcatgctccctgcaggtgctggtcgagggaggtgccggcctcttggtgacactcagctctgccacgtgttgggtactgaatgggagctgagggtgcccaccctagttagctcatggatgaagtgtggagttgaagactggggatttatatgtatatattagcagacacacacacattatctatctctctatttaaataaaatttcaagaataagacatatataatttataacagatttacatagatacatttgtatatgaattatgtaacatattaaaaataatacatatttatatgttatgtttataaaatacatttatatgcacttattatatacatataatgtataatattatatacatataaatgtaagatgtaagtttaaatatagataccggctgggcgcggtggctcacacctgtaatcccaacactttgggaggctaaggtgggcagattacctgaggccaggagttcgagaccaacctggccaacatggcaaaacccccatctctattaaaaatacaaaattagccgggcatggtggcaggtgtctgtaatcccagctactcatgaggctgaggcaggagaattgcttgaacccaagaggcggaggttgcagtgagcagagattgtgccattgcactccagcctgggcaaaaagagcgaaactccatctcaaaaaaaaattaaataaatatagatatcttcacatgtatatttatatagagaaaatttttatgtattatggataacatttatatatgtagattttcaggaatattgaaatattggaatgaatatgcaaatggaggcaaagctggttttcccactagaatgtcttatttttttcaacaatgtattccacgcccctaaaatgctgtctagcacacagtaagttcttagtgaatattttctgagtaaataataattcaatagcttagtttcctcactgataaaatggggataatggtaatccttaccttggaaggttatactagatattagatgaaccagtatgcaatggggttggaagagtgcctcggacatagcaggatctcagtgttaagccttgcagaagtccagtgaggtaggtatcactgctctattttcttttttctttctttctttctttctttttttcttttttttttttgagatggagtctcgctctgtaacccaggctggagtgcagtggtgtgatcttggctcattgcaacctctgcctcctgggttcaagcgattttcctgcctcagcctcccaagtagctgggattacaggcgcccgccagcacacccagataaattttgtatttttagtagagacagggtttcatgatgttggccaggttggtctcgaactcctgacctcaggtgatccacctgcctcagcctcccaaagttctgggattacaggtgtgagccaccacgcccagctggtctattttcattatgaggaaaccgaatgtcatagaggttaagtccagtgatttcagaatgagccacaggaatcaccccactggaaaaattgcccatatcatggatgacatattctcttggcaatacatttttaaacataatgcagtttactatagttttaatgaaaaagacagtataggtatagaacattttagaaaacatttgtaagcattgaaaacaaataaaatttcccattatcccaccacatacagatcccagtgagtcatatttttggatgcaagcaccttagatccagtggcttaattaaatagggaaatgattttccttgcaagaagtccagaattaggtgttgcgaatattgctggtgttgctggttctatgcttagtggtgttgtaaaggctctaaactaagaatctgggttttccccagttttccattccaccatcaacatgttgacattttattgtattttcatggttgcaatatggttgccacagctccagacatcatgactatgttcaagtcaagaagaagagggatggacaggaccagaaagcccttctttcatgtctttgtctttaacagtaaatgaaagcccagaaaactctcagatttccctttacctaattggtcagaagtgtatcatgtgaccactcatatgggcaaaaaattttgaaccaacagctgtttggcttcctaaagtccagagtgggcgctgtcaatgctgaggaggttgagaatggcttttgggttttccaactctgcctgccacactagggacaatcgcatttaacattttagtgtttatccttctagtctttgttactgtatttttaatacttctgtccctgtagacatgacccttggaatcacgtttgtattaattctgctgcagactctgaggaaattcttttctctctcacagggttaaagtcctttcttgctttcaaatatgctatggagccacagttgaggacagtagtttcctgcaggagcctaccctgaaatctcttctcagcttaacatggaaatgaggatcccaccagccccagaaccctctggggaagaatgttgggggcggtcttcctgtggttgtatgcactgatgagaaatcaggcgtttctgctccaaacgaccattttatcttcgtgctctgcaacttcttcaattccagagtttctgagaacagacccaaattcaatggcatgaccaagaacacctggctaccattttgttttctcctgcccttgttggtgcatggttctaagcatgcccctccagagcctatcatacgcctgatacagagaacctctcaataaatgatttgtcgcctgtctgactgatttaccctaggataaagactctttgtgattttaaagaaatggtcagtaaaactgtaatgagagtcccagggaaccaagacggcacatagacagataagctactttggcacaaacacttaaaaatagttgtgttggtaagtagggggatgtttgatgtagcagaattctagcactccctggagggttgaagcacttggtgacaacaacctttggaaagtgctttggtttcctgaggtccttcaggtaaccaagacctccctgttttctagaaactttctaatgacttggctaggatttaggattttctctatcacagttatcgctacctatccttaattttttttttttttttgacagagtctcggtctgttgcccaggccagagtgcagtggcatgatctcggctcattgcaacctctgcctcccgggtgcaagtgattctcctgcctcagcctcccaagtagctggactgcaggcgtgcaccaccacgcctggctaatttttgtatttttagtagagacggagtttcagcatgttggccaggctgatcttgcactcctgacctcagatgatccacccgcctcaccctcccaaagtgctgggattacaggcatgagccactgcgcccggccaccatccttaaattcttgagcttgggagagaagaagatgaaggtttaaatgcaggtattttcacttctatgggcactgtaaaacctcccaatccaaagcgtggtccctggatcatcagcatcacctgagagcttgttagaaaagcaaagaagaatctcagaccccactccagacctcctagatcaggacttgcatgttaacatccccaggggatgaatataaccatgggtgtctgaaaagcactattgtagaacattcttctgtttgccatgctgacagcagagcttgtctttaaagccagagagaaatgtcttcttcttgacttggaccctttgcatcttctcttagaataacttccctgaaaactcaattgatgtcttctgtctctttgagttgcagtgtagtcatcccctctgctaggaagcattctttgaatctcctacagtagaatttggcattatttttgtgtgtgccaaaaagcttcatgctttctcaccctgtattatgatttctctttttgttgggtgtctccaacatagactgtgagcttcgtaagtacagagatttgcattaagtagcgtctcaacaaatatgttgaatgaatgaatgaatgaatgattagaatgattactcttcattttgaagacaggggaactgaagctcagagaggttaagtgactatcccaggatcacacagccacataggtcgttgagctgggttttgagctcttgaccataaagctccttctccagatgccttgttcccctttttctcttcctttcgtgccaggaatacttagtttagggttacagagactagaataatatttactctgagtcacctaagcagttaggattcaattagctcagtcatatcatgcactggacaatttgttaacaatattaaactcagttgatggaggctctgtctttgttattcttggcagcctaacttgggaggtgggacacatgtttgtgaacaagagttcatctatgataaattagtcttcaacgcttggcttatccagagtgctcaatacagaggtgatagttcttagagagatggaagcaagagatggcactgctcctatccatagccaattgtcataggtcaatggcatcaatgggcccaataatggtctccatttagccacatccctttcctgtaactttgtaactctctccttgtctgactctggggttggacttgagatttgctgcagccagtggaaggttaggaaatgtgactggaacgtaagtttcaaaatcgtatgtgtaatccttcttaccagttacacgattacatttgctcaccttgcttccttacccccaccatgtgaacatgcccaagcccgcctgctggagggacatgagaaacacagaatgaagggtaagtcaccgcagttacactggtggaggttgtcctcagccagccaccatgccaacttgctgctttaatcacaggagagagcccagccaacatcagcagacctgctcagccaacccataaacagactgaggagcagcaagaaagtatcatttttcagacactgagtttcaggagttatttgttatgaagcatttatttgtagcaattgctgatggatacaacaaccaaagtatggtcaacattctgcattggactgcaacaatttggaatgtaaaaagaaagaattttgatctcaatttcttctgagatatcaggataataaattctgtactacttgaataaagttttttcctgagagaagatttgcctaaggctttgtctgtctgtacaacggtgttacatgttggtctgaaatatagtcaccttaagaagctctatatttctaaggtaagtggataaaggtgtgacctccatgcaggatttttttcgtactacacacatcaagctatacttggtacattttttttacccttgtggtctcatatgtctccgctagagggagaaaggagacaattaaaaaaaaaatgcggcccggcgcggtggctcacgcctgtaatcccagcactttgggaggctgaggcgggcggatcacgaggtcaggagattgagaacatcctggctcacccggtgaaaccccgactctactaaaaatacaaaaaaattagccgggcgtggtggtgggcgcctgtagtcccagctactagggaggctgaggcaggagaatggcgtgaacccgggaggtggagcttgcagtgagccgagatcgtgccactgcactccagcctgggtgacagagcgagactccatctcaaaaaaaaaaaaaaaaaaaatgcatgagtagaagaaatacgttctgaagttcactggtagagtagggtgactattgttagcaacactgtattgcatatttcaaaatatctagcagagaaaacttgaaatgtttccaacagctagaaatgatcaatgatcaagatggtggacaccccaaataccctgtctttatcattgcaaactctgcatgcaacaaaatatcacatgtaccccataaatatgtacagatattatatatggaaaaccctaagtggctgcaaatcccatgaatataatgtgaaataactttgctatcttataatccaaataattgtgtacagaaaattacagatccattcactcaaaaaatatttattggccgggtgctgtggctcacgcctgtaatcccagcactttgggaggtcggagcaggctgatcatgagaccaggagattgagaccatcctggctaacacgatgaaaccccgtctctactaaaaatacaaaaatcagccgggcgtggtggcgggcgcctgtagtcccagctactcgggaggctgggacaggagaatcgcttgaatccgggaggcggagcttacagtgagccgagatcgcgccactgcactccagcctgggtgatagagtgagactctgtctcagaaaaaaaaatgtattgaccacctctattgtgcttccccctcaaacactgaagtagttaaaaacattgaaacattgaaaagtaattattttagaacctaaaaagtattttaaatttaagtattttatagttcccaaactagaattattaaaattatactttactggttctaatggaagtaaactcatcaataacagtttttaaattggtgtctgaaaagaaaaatcattaaaaaaatattatttggccatacaaaaggagattcctgccatttgcagcaacaagaatgaacctagaggacattacgctaaatgaaataagccaggcacagaaggacaaatactgcatgatctcatatgtgaaatctgagaaaatcaaacacactgaaagaatagaataacggttatgaggaacagggatgaggtgagggagaaatggagagaagtaggtcaaagggcacatagttgcagttatgtaggaaaaataagtttagaaatctaatgtacagcataaagactatagctaatgatattatattgtatttatttcatttatttggatattttctctattttcttagtctagctaaaggtttgtcaattttatcttttcaaaaaaaccaactcttcttttcattgattttttgacttgcttttcgtctgtattttgtttatttatgctctgagtcttattatttacttccttttaccaatttttggcttactgtgttcttattcttctaattcctcggggtgcacagttgggttgtttattagaaacctttcttctttttgaggtagggtgtttattgctatgaactttccttttgctatgtgttaggggtttctgtatgatgtgtttccattttcattggtctcaaggaatttttaaatttcccttttaatttcttcaatgagccatcagttatttaagagcataaggtctaatttccacatagctctaagttttccaaggtttttatagttgttgatttttagttttattccactgtggtccaaaaagatacttgatatgatctctatcttcttaaatatgttaagacttgttctgaccaggcgcagtggctcacgcctgtaatcccagcactttgggaggcccaggtgggtggatcatgaggtcaggagattgagaccatcctggctaacacggtgaaaccccatctctactaaaaatacaaaaaaaaaattagccgtgcatggtggcagacacctatagtcccagctactcgggaggctaaggcagaagaatggcatgaacctgggaggcagaggttgcagtgagctgagattgtgccactgcactccaacctgggcaacagagcgagagtctcaaaaaaaaaaaaaaaaaaaagacattacatggacactaacatgatctatcctagaaaatgttccacgtatagttgagaagaaagtatactcttcactggttggttggaatgtcctgtaaatgtgtgctagacccatttggtctatggaatagtttaaatccatgtgtatttgtttatttcttgactagacaatctgtctattgttgaaagtgggatgtcaaagtcccctataagtactgaattgcagtctatctatcccttagatataataacatttgctttatatatttggatgctttggcgttgggtgtatatatgttgatgatggttatagcctcttgttgaactgctatatcttttttttttttttttgagacagagtcttgctctgtcgcccaggctggagtgcagtggtgctatctgggctcactgcaagctccgtctcctgggttcactgaactgctatatctttaacattagctaatgatcttctttggttctttttgttacgatagtttttgacttatcatcaattttatctggtataagtatgacttataccactcacttttggtttctctttgcatgatatatctttatccatcccttcactttcagtctgtttgtctttaatggtgaggtgagtctcttgtaagaagcatacagtttggtcttttaaaaatttcattcagccactcaatatattttttttctttttctttattttttttttttttgagatggagtctcactctgtcatccaggctggagtgcagtggtacaatctctgctcactgcaacctccacttcctgggctcaaacaattctcctgtctcagcctcctgagtagctgggactaccggcatgcaccaccacacccagctaattttttttttgtatttttagtagagacggggtttcaccatgttagccaggctggtctcaaactcctgacctcaggtgatccacccacctcagcctctcaaagtgctgggattacatgcatgagctactgcacctagccccaaatattttaaaacttttttttttgaagctcttcatggtaatctagggtgtttatgtgtcataaagtatttaatcccagtttgtatcatttctaaattttcagtgctataaacaacactgtaatgaacatctttgagctaaaattttaacactctactgcataagtgactttaaaattagtaataggttataagtgggaagaaatttatatgttccccttagtgtttgattaaagacaaacatttttcactatacaagggctgccaaaactttcccaaactgtaaaaaacaaaccattagaggctgggcatggtggttcatgcctgtaatcctagcactttgggaggctgaggtgggtgaatgacttgagcccaggagttcaagactagcctgggcaacgtggcgaaaccctgtctctaccaaaaatacaaaaattagccagtctcataactggtctctaaataaataaatagataaaaatttaaaataaaataattttaaaagtagccattagaaacatagtaatttggctgggtgtggtggctcacacctgtaatcccagcactttgggaggctgaggcgggtggatcacaaggtcaggagatagagaccatcctggctaacacagtgaaaccccgtctctactaaaaatacaaaaaaattagccaggcgtggtggtgggtacctgtagtcccagctactcaggaggctgaggcaggagaatggtgtgaacctgggaggcgaagcttgcagtgagccgagaccacgccactgcactccagcctgggcgacagagcgagactccatctcataaaaaaaaataaataaatagaccaatatagtaatttgaagtttatttaatttttgctcccagaaaatctttccatcatcagttctaagccatctggttgccttctgatgtgacctttctgttccattttgcctaaagttattaactttttatttgtaatacttggtatgttggatcaatttcagatgagttcattgtctcatttatctctgtaagtttactatccagcagaagattggggtcactgattgggttaataatatttgttaaatgaatatatccaggaaagagagtgtgtctatctactgcacagcaacagaacactattctgatattctgtgtcgtgaagtgatcactcttggttttataaataacagattctgattttcagaatcttcaaaacagatctcttttgtttaattttccagtaacaataaccctgtgctcattctattactaatattactatttataaaatgacaataagtgattgaggtcaggtgttctaaaagcagagcctgagaccaggattgtggtgcccatgatttactgagggagtgcttggaggagaaaagtgagggagtcaggatggggttgggaagttggagggtaaggctatggtctcagctggaagtgattgcagcctgatctccggggagcgctggagcatgagtcatacctcagagttggtctcactttgagtcaagggcccaagccttgtttatgcctgtgtcagtcaattattggctacattgccccgacaatggtagggcagtgcgtcaccttccagatggagcacttcctgttcagctgaaaccagtttcctggagaagaggatgggggctgaaaaggaaattaggaacgggcagcaacagtaccagctactctgctcatgatcatcaaatatgaaaaagaaagctatgagtcccttagatacttgattgaagttcactgtcatgagattttgaactgcattcaaaaaagagtattgtttctaatgatattgcaaacttcttagacattccagtaagcatttcacttactaaaaaaaaaaaaaaaaaatttttttctgccattcacttagacttctttttttaatgtttattttaggttcagggttacatgtgcaggttagttatataggtaagttgcatgtcatggggatttcatgcacagactttttttaatcatccaggtaataagcttactacctgataggtagttttttgatcctctcctctcaccttccaccctcaagaaggacctggtatctgttgtttgttcccttgtttttttgtttttgagatggagtcttgctctgttgcccaggctggagtgcagtggtgtgatctcggctcgtcacaacctctgccttccgggttcaagcaattctcctgcctcagcaggacacccaatcccagggaagttcaaagctaacataagatagaattcagttattcccctagttccttgtaattgaatagaaacattttaccaacttatgttaatattatacaattttaatccctggatattggaactgggtctgactcactaactgaaaactttcacgttttgtgctattcacaatagcacgtttcagagctattgtttttctcatttttcttgccctaaatcacctcagacatctgcatttattactgcaactttgtccttacctataaactaatccctagaccaatggttttcaactgggagcatttttgttcccaggtggcaatgtctggaagcatatatatatacattatatatatatacacattatatatatatatacacattatatatatgcacattatatatatatacacattatatatatatacattatatatatacacaatatatatacattatatatatacattatatatatatgaaataaaaaatatatatttcaaataaaaaatatatatttcaaattaaaaatatattttttcaaataaaaaatatttatatttcaaataaaaatatatatatatatatttttaagacagggtctctctctgtagcccaggctggagtgcagtggcacgatctcggctccctgcagcctccacctcctgggttcaagcaatcctcccacctcagcctcctgaatagctgggattataggcgtgagccactgcacccagctgatttgttttgtatttttagtagatacagggtttcaccatgttggccaggctggaactcgaactcctggtctcaagtgatccgcccacctcagcctcccaaagtgccagcatcacaggtgtgaggcactgcaccccccctctggaggcatttttgattgtcatgactggtggggaagtgtcactggcacctactgaataaggccaagctgcttctaaacaccttacaatacaaagaacaaccccttacaaataagaaattatcagccggcgcagtggctcacacctgtaatcctagcactttgggaagccgaggcaggtggatcacgaggtcaagagatcgagaccatcctggtcaacatggtgaaaccccgtctctactaaaaacacaaaaattagctgggcgtggtggcatgcgcctgtagtcccagctattcagtaggctgaggcaggagaatcgcttgaacccgcgaggcggaggttgcagtgagccaagattgcgccactgtactccagcctgggcaacaaagcgagactccgtcgcaagaaaataaataaataaataaattatccagcccaaaatatcaatagcgcagagtttgagacataataattaggtggaggccgagaatatttaatgtatcatctctgccattcttgccttcacgaattttctaattcagggaggcaggatttacaaacacacgtgacatcatttgtgaaacagcacaccatgtagaagggtaagtcatgttgtacagacctgaataaattgagtttaaaagatggatttatttgaaagcctgaataagaaatcggttttgaaggaagcagaagccagattggctcttaaaaagaatggaaaagaatgagagaggcaggaaggaaagaaagcagccgaccgggagtggtggctcacgcctgtaatcacagcactttgggaggctgaggcgggcggatcacctgagctcaggagttcgagaccagcctggccaacagggagaaacctcatctttactaaaaatacaaaattagctgggtgtggtggcgcatgcctgtaatcccagctactcgggaggctgaggcaggagaatcacttggacccgggaggtggaagttgcagtgagctgagattgtgccattgcattccagcctgggcaacaagagcaaaactccatcaaaaaaaaaaaaaaaaaaaaaaagagagagagagaaagaaaaaaaaaagaacaagaaaaaaagaagaaagcagccttcaagttggaagggaggaaaaatggccaatagaggagtctgaattcaaatctgcaacacctagaatacatggcttatttattctgtctttcttcaactgccatggaccagagagcaatcgcaacatgactaggaattcggcacaagggtttctcagctgcccaggaatattgcattttacgaagcctttattcgtgtacatttgaaattatgcaaaacaaaaagttgcgctgcatgcacacattttgcaaccatgtgaatatcccttcattttcccttttccaaaggaatcccataacttcaaagccagcaggtggagtggatgtacactactctgtttatatctatggaggagacatttgctttaattaagcagaaaagtcctcaaccctttgtctgcaaccctagaagaagacctcacatgattttctttttttttttttttttttgagacagagtaccacggcctcccaggctggagtgcagtggtgcaatcatagctcactatagcctcgaattcctggggctcaagcaatcctaccgcctcagcctcctgtgtagtggggagtacagcaatgcaccactatgcttagctaattttgtaaattttttgtagatatggggtctcactatgttttccagggcgtctcaaactcctggcctcaaacaatcctcctacctcagccccccaaggtgctgagattacaggcatgagccaccgcgcctggtttgaaatttcttcaaataaatgatgataactcttgcctattttaacattgacagtcattagcatttaaaatctttttggagctgttctgtcataacaatcatccacacatttattaatatgctgaaaacatacctaaaaaccagtaactttgtaaaagtaattagacatggtaaaacgaaaaaatgagtccgaatgacccacgttttttgtttccagacatttgtactgggacatgttcaagaggacactaagaaaacaaaatgatctttaacccatgtgtacatgtaggttccaaaagtctcaggcagaccgggctaggtcgctcacacctgtcatcctagcactttgggaggccaaggagggtggattgcctgagacgaggagttcaagaccaacgtggccaacatggtgaaaccctgtctctactaaaaatacacaacatgagctgggcgtggtggcaggcgcctgtaatcccagctactcaggaggctaaggcaggagaatctcttgaacttgggaagcagaggttgcggtgagcagagatcatgtcactgcattccagcctgggcaaccagagcaaaaccctgtctcaaaaaaaaataaataaataaataaaaaagtctcaggcaaagaaaatggggaaaatgtcagtgtcttggacaaaagagcctgcgcagtgacaatacacccctaagctaggatgataatgcatttttgtttttggttttttatttatttatttatttattattattatactttaagttttagggtacatgtgcacaatgtgcaggttagttacatatgtatacatgtgccttgctggtgtgctgcacccactaactcgtcatctagcattaggtatatctcccagtgctatccctccctcctccccccaccccacaacagtccccagagtgtgatgttccccttcctgtgtccatgtgttctcattgttcaattcccacctatgagtgagaatatgcggtgtttggttttttgttcttgcgatagtttactgagaatgatgatttcccatttcatccatgtccctacaaaggacatgaactcatcattttttatggctgcatagtattccatggtgtatatgtgccacattttcttaatccagtctatcattgttggacatttgggttggttccaagtctttgctattgtgaataatgccacaataaacatacgtgtgcatgtgtctttatagcagcatgatttatagtcctttgggtatatacccagtaatgggatagctgtgtcaaatggtatttctagttctagatccctgaggaatcgccacactgacttccacgatggttgaactagtttacagtcccaccaacagtgtaaaagtgttcctatttctccacatcctctccagcacctgataatgcatttttgtattgcaaaatgcaacaccctctttaatactgatccatatgaaaattgttgaattatgtgaatgtggagtgttaatgtaagatctttgggagcataaaatacagcagagaggccagaaagggaactatgagctgaatccagatgccagttagtgagtttctggcaaggtggcagtagctgcaagaagaaaatccacttctcccgcccgccatctttaaaatgcatccttccgacacttcattgcacgtgccacactactggactctggatctaagaattctcccaaatgtcttgttctttctatgaacataaaaagccaaaataggtgaatgagcctagacttttcacaggaaagctagaaatagtggcatttgtccaatctatgtgtgaccacaggggcgctgtagacaaacggaaaggagcggtaacttccgggtcattgccatggcacttgccaggtcagttcatctttagccaagcagcagagacgagatgaacctgtggctgcggttgcttggttgactctgcagatgatgatgcagtgcctcctttatgaaagatttctgaggacttccccacttcttcctacttgcggggaagataataaggagaaaaggtgacagagaaattaactaaaacttctaacttgcccagagatgacaagctaggatttctgttaggtccaaagctcaatatctgacattacaacttcccatcctccaaaaaaaactccaccatctaataatggttattttatttgatcttttcacaaacatttacaggggcttcctgtggtgccaggcagccttctaagcgcttaacttatttgacatcatttaatcttcacaatgagaagtgctacccttgctaagaagctctttatcccaaataaagctcatatctttgtaatagctccatggtcttagcattcaggctgccgcaaggggcaaacccagtttcacgagtcacagcacttaggaatctgtggtttctgaccaaaaagagtctcttcctagccctccaaatctaggtaatttcacaaaccggaggtcgtttttatcatacacagccttcagatttttggtcaagtgccagcttcttgtagtcaccttatttaaaactggaatcctcccaccctgtcattcctggctgctctccattgctctattttttctaaagcatttatcactttctaataccataaaattcactttttggggtctgttgtcagttccctcacccaactagaatgttagctctgtgaggtcaaggactactgtcagtgggtccactgatggttctccagcacctaaacagtgcctggcacatagcggacaataaataggtgttaaatgagtgttgttaataaattaaactttttttgttaaatatcccttggatgtttgttgaaggaagaaatgaaaagagagaggaagagaaggagggagtgatagaaagaatgaaacagagagttagaaacgagagaggaggaagggagagaaaaagatagatggtgtaaaagagagtgagaaagaaataaaacgtaaggaaggagagggaaaccaggaatgagggagaggaagagactgagagagagcaagaaaaaagggagaaaaggaaggaaggaaggaggaaaggagggaaggaaggagggagggagggaagaaaggagggaggaaggatggaaggaaggaaggaagaaaggaagggtgggtgggttctggttttggtctcaaaacccagaaacttcagctgcataatacaggaacctaatgcaatttctcttttctttcagatcaaggaaccagaaagcttctagaggcatgagatgtcggattccaataaagcactcagaaggagctgatcttaccgttttggtttgggtagtagagcgagacatctcagtgctttcagtttctacccctttccgcatcccactaaaccactttttatattccattcgaacctggaaatttgagtggagaggtccgtgttacatccagagcttggtttgggagaaaggatcctaaaatgggaggctaaagataaagacaccaagccctactctctagttttccatataatcttggccatgcccatgttgattcattttatttaaactcaaacttctcagttgtaaaaaagatgtgtattaaatatcagacactataggactcaatagatgatgatgatgatggtgatgaaggtgactgttgatgatagtggtggtggtaatgaaagtaattaagatgatgatggtgatgatgaaggtgatggtaatggtgatgatggtgatgaaggtgataatgatgaagatgatgataaaggtaatgaaattgatgatggtgaaggtgatggtaatggtgatgatggtgagggtgatgatgaagatgatgacaatgaaggtgatgatagtgatgatgatggtgaaggtgatgatgatgaagttgatgataatggaacggacgatggtaaaagtagcggtgatgattaaaatgatcatgatgagggtgatgatggtgatgttgatgaaggtgatggtagtgaaggtgatgatgaaggtcatggtgatggtggtgatagtgatgatgaaagtaatgtgaaggtgatgatgaaggtgatggtaatggtgatgatggtgatagtgatgatggtgatggtgatgatggtgatggtgatgatgaagatgatgaaggtgatgatggtgaaggtgatgattataaaggtgatggtgatgacagtgatgatgataaaggtgataatgaaggttatggtaatggtgatgatggtgatggtgatgatagtaaagatgatgaaggtgtgataaaggtaatgaaggtggtgatggtgaaggtgattattataaagatgataatggtgataatgacaaaagtgactatggtgatgatggttagatgataatggtgggggtgttggtgattatatgatggtgaaggtcaccatttattgaacactagctatattcaagacactgtatatgcaatatatcatttaattcttacataaatggagtaagaaagacatttctcctacccacaattaaagatccgaagttgagactcttgcagttaaattgatatgcccaaggtcacacagccaggactcgaaaccttgtcatcttactcagagccctgacgctaaccattacaatcacccatcctctgtgattccaagaattgccttcctctaacctccttaacatgctaaaaatgacatttaaagatttaatgctcgacatcatttcacaaggacaattaaattatattttacttcttctgtgagtgagaagtaccaagcatgaaggcactaaaagattgaagagaaattaatgacgtgttaagatagccttttgccactagcgtcttaactgctggtagttttattcaacagcaaagggaaaatgccaggaaaatttgtcctaattttctatggagagtaaaattgaaataacactcactgagatcttaataacaacactaactgagatcttaatgtgtgctaaggactatgttaggagtttgcactgattcatttaagtcttcaaccctgtaatgaaggcatcaccacatctgcagatgagaaaactacagatgatgctcagaaaggataggcggtttacccagagtcacacagccacctactcagtggaagaactgggattagacttgaagtctctttgagtttgtggtagattgtgccacatatttcagcatcacttcttgtagtgcccctcactacagaaggattattcatccccttcttggtgaactgaggtatggccatgtgacttgctttgactaattaaatgagagcagaacagaagtgcaccactactaggtagaagctttaagagagctaagctgtgctttcccacaatctccttttcctgtgccatgaaaccatcaatgttctaaaaagggggccacaccttcagcctgcactccagaggaaagacgatgtgggttaagtcacagttatgtagcacaagcaagaaataaatatttattgttttaagttgctaagattaagtgtgggaggcaaggggctatttgttattgcagcataatccactttatcctgactgacccatgctcttcaggatatgttaggatgctaaacagatgaaacccacagcatacagcataccccagcagcacctaaaccctcatccccaaatcaagacaaacccaaaatacaattataaaaggtcagggaagagtgagaacgtgaacaaccattcaattagactttgggactaggctgatgacagacaaaataattagccttacctggcgattaaggagacagtgtaccacaaagagcaacactccctgaagggtgttgatgatggtgaatgagtatgcaatgattgatccaatcgtcttccctacttcttcaaccataaaaaaaccaaggccccaagaacagcccaggataaatagctgagaaatggctttaaatgtcatgactctgcagggaataaaagtaataataactacggtttaccaggtatccactacaagtgctaactaaatgctctgtgtgcattcccttatttaaatctcacaacagcttcatgcagttaagtgacgtatacaacaaggtcacacagcttgaggatgaagtggaacccatgacttcagtcatggcaaatcactgagaatagtgctttctccccaccgttgaaaataatttgatttctctgcatgtcttctgcctagattttttggaagatttatgggaaaatgccttctagaaatttgtattaaaacatttgaataatggtgaattcctgactttagaacataacataatgttgggtttcttcacacaaagtatattgtgtttcatataatggagtgggattgttgatggcagctggctgggagagctgatgagtgtgtgtgtgtataggtgtgtgtgtgtgtgacttcactttttactttttgtgttaccccctgggaatataaactctatgagggcagggattttggtctgttttactcactgctttatctccagtccttagaacaatgcctagcacatagtagatactcaataaatattatggtttgtgataaacttgctaattagtccttcctgttcctgatttggttcctaggttttccacaactgctatctagcttggtgatttttcttacatccagccctccttccatttgcacttacagaaagatatatacttatagaaaagacagaaaacctacctatgtccacatttaggagacagcataatcactggtatatgaggattctcccatgacaactttctctttggcctaaatggtgccatatggcttcatccccactgaccatagccagttgccccacagtagacacctgacctataaggagtcaatcaatccattttccccccagccaaccagattttgtctcttaagcatttgaagtaagaggcttggagaatggacctgtgagacgcctttgaggtggctctgccctgttcatcagctgtgggaagtcagtctgcagggagaagaggacagagccaaggtgcaggaaagggagccataaatatgcgattttttttttgagatggagtcttgctctgttgcccaggctggagagcagtggcacgatctcggctcactgcaacctctgcctcctgggttcaagcgattctcctgcctcagcctcccaagtagctaggactacaggcgtgtgccaccaccatgtctggctaatttttgtatttttagtagagacggggtttcaccatgttggccaggatggtctcgatctcttgaccttgtgatccacccacctcggcctcccaaagtgctgggattacaggcatgaaccaccgcgcccagccagatatgcgattccatatcacaatggttaattctggagcttaggagacaaagggactcaagtggatgggggcttctaacagatctggaacaagtctctcaacaactctttcccagcctccccttcctgccatgatgtctgaaatttctagaatccaagtccttcctattgaaagagcatgatgtttccaccatgtcaatgttaacctcggatttattacttaggaaatagacgagatagttaatctctaccccaaagtgtgacattaacctagtgtagcacaacagggtaactgtctattcaccagcaagaggaagaggttggcagcagggcatggctgctgggatgaggtcagacatggagcttgctgtttgcagttctaaggaagaagtgagcccttacagggtaaggaattgagaaatggggggatggggaaacaccaagaagggtggcactttgaccctcaagaattgaggaaaccaaatttaagaaatgtcagactggtctgataagtagaggagtcttgagacagggtctgaaattagacagtcctttaattttcatgcacgtgactcaccaatgcaagatccttacccactcttggggtaaggatccagcatctatcaagattctattgaatattagcttttgtcatcattatttttaatagcatagattggtacccatgagaattgagtttctacaaccaaagaacatggagtccaggtagggtgcggtgtggttcatgcctgtaatcccagcactttgggaggctgaggcgggtggatcatctgaggtcaggagttcgagaccagcctgaccaatatggcaaaagcctgtctctactaaaaatacaaaaattagccaggcatggtggcgtgtgcctgtagtcccagctactcagaaagctgagacaggagaattgcttgaacccaggagaattgcttgaactcgggagtgggaggttgcagtgagacgagatggtgccgctggactccagcctaggcaaaagagtgagactcagtctcaaaaaaaaaaagaaaagaaaagaaaaagaaaaggaaagaaaacggagtccaggggcatatgggctcttggtggagtgagaggaggatgttgatactcttggaattaatttcataataagagtgtgttatacaaaggaggcacttgataaatgtttatttttcttttcttttttttttttgagaccgagtctcgctctgttgcccaggatggagtacagtgacatgatccgtagctcactgcagcctcaacctccccagctcaggtgattctccctttgcagcctcccagatagctgggactgcaggcgcacgccactatgcccagccaattttgtaaatttgttgtagagacaggggtctcagtatgttgccaggctggtcttgagcagctggactcaaacagtcctgtcacctcagcctcctcaagtgctgggattacaagtgtgagtcactacacccagcaggaatatttattgaataaggaaatgaagttacctgaaaatcagagtttctatttcttctataaattgtccttcacatgctctttatcgcgtaccagaataatttatatcatatttctgcttgggttctttctttcccaaaagagcagccacgtaggaataatgtttgggtaccactgattctgatgccttcttacctggtgtcctgaatggtggaaacttctttattgagggaggaaagtttgcttctcaaaatccacagaacttggaagtagaacaccaggtttatctgtgggaaccgcatgaaaaaagtgacttggaattttcttttggagccattttatacaatctaatttgaggagggcctaagaatcttttcccaaaagacacaggttttataaagatggtatgcacatatgttctggtctattacgtacaacacgcagcatataccctgtagcatttggtgcttgattaggtaactatcgaatttatcattcaaaccaggagactttgaaagtggaaaggtgctattaatgtctctaccagggaacaggtgtcatcagaaagtttccggcaaacaggaaaccatgtcaccctgtgtagagaagccaaccattaaatatttgttgaatggaatgaataacagcattttgaaaagaagtcccaggagaggtgatattattacatcaaagcaacaagtgagccaggaggaatccaaggaaagaaaagtggagacagtactttcaggaagaggggctgatcacattaagctgttatttcttatcttcatctcatttccccttagataagaaaaacattttgtatgcttggtcaacctaaggcgggcacacccataaataattatcgcctaccaagataatgactgctactggccccatgaagctccagatgaatcctttatcaagcttgagccaacagctgttgagacagagagaagcattagctgcctcttccttgggagaaggcagagaacttgaatacaggctcctggggcaagatgtgaacagggccaggagttacttcggtcagaatcctgaattttagatggagtcagatgtgagttctcatttgatgcaggtgcatgctctgaggctgagttttttcaagtgtataatagagctaatcaaagtactggaaagattaaatgatgaccgtagctgtctactgaggcttgaagtcagggaatgtcagttctctggcttcattgttctccttctaaatagagttggtcattctaggtcttttgcctcctttatctaaacttcagaatccgtttgtccaatatccacaaaataattttctgggaatttgatttggagtgtgttggatctatagatcaagttgggaagaagtgccatcttgacaacgttgagtcttcttatccatgaacatagaatatctatttggatatcctttgatttttttcatcagaattttgtcactgccttcatatagaacttgtaggaaagattaaataagataatgtgcttaaagtttttgagtacagttcctagcaatgagttaacggtaataaatgtagttagcaagttgataatgattgctataatgagaaagatagtaaaaacgataactacagctataaaaactaactctaattaagcatattgcatgcaccaggtactctgttgtccagataatttgtattctttcttggcttatgatggcaaaggtagcataccttatttttaaagggaagctgagagcctgaatctctaacattcagtaggcagaaaagcttccaaacttaagttctatccgaagggctgccaactatggcccacgggtctgatccagcccgccacttgctttcataagttttactgaaagacaatcaactcattcggttacatattgtcaatgctgctttcacactacatgggcaacattgagtagtcacctcagagaccttgtggccagcaaagccaaacatatttactgtctggccttttatggaaaatgttggttccaaatctttgctattgtgaatagtgtcacaataaacatacgtgtgcatgtgtctttatagcagcacgatttataatcctttgggtatatacccagtaatgggatggctgggtcaaatggtatttctagttctagatccttgaggaatcgccacactgtcttccacaatagcaacccaaatgtccatcagtgatagactggattaagaaaaggtggcacatatacaccatggaatactatgcagccataaaaaaggatgagtcaatgtcctttgtagggacatggatgaaggtggaaatcatcattctgagcaaactatggcaaggacagaaaaccaaagaccgcatgttctcactcatacgtgggaactgaacaatgagaacacttggacacagggtggggaacatcacacaccggggcctgtcgtggggtgggggtaggggggagggatagcattaggagatatacctaatgtaaatgacgagttaacgggtgcagcacaccaacatggcacatatatacatatgtaacaaacctgcatgttgtgcaaatgtaccctagaacttaaagtataattaaaaaaaaaaaaccaccaaatttccatcttccataatagaaaaaaatcagaagggagtacctaaaattgtaaaaaaaaaaaaaaaaaaaaaaaaaaaaaaaaaaaaaaaaagaaaagaaaatgttggtcaactcctctaccgttctatctccagcattctggtaggacatagagttcaagctggaaacaaagcacctctttgactttaagaggacaaagcacctctttgactttaagagggacaacattgggaggccgaggcaggcagatcacctgaggtctggagttcaagaccagcctggccaacctggtgaaatcccgtctccactaaaaaatacaaaaattagcagggcatgatagcgggtgcctgtaatcccagctactcaggaggccaagacgggagaattgtttgaaaccgggagacggttgcagtgagctgagatcacaccaccgcactctagcctgggcaggtgagcaagactctgtcgcaaaaaaaaaaaaaaaaaagggacaacagtaactaacatacatgatgttttagtgtgtgcacaacctacttcctaacccaagcaccattaacaaaatattgacttcttcaactaactgttgtgtgttgagttttgcaagcttcattactgaagcaataaaacatggctattcagactatttccttgaaaattctgacttacttgccttgcagctctgactttggggaagtttatgaaatgcactcaggcccaggtgtcctgtgcgtaagaaaataaactgctgacgtcatagggtcatggtgagaatggcatgagctactgcatagaggaagcacgatttttgatgcaccatagggctttgatagttgtaatattggtgttattctttacagtagccattgctactaccatcataaagacacacattatgcttactgagtaaatgttccataattctggggtccaactattgctgacacagcaataatcacagctgggatcccgtagcctacagggtacatgaacctcttcttgaatctgcccgtgctggtgtagttggccaccttgaggttcctgacggtgaggaagaggtgcagcccttccaggagcatccaggtgaagcaagccaggtagaggaagtgcagcagccctgcaatgatggagcacagcacctggagggaacagaagagttaggggtgtgcagcagatgtggtctgtacctgattatatgctcagcacttagcatttcctggatgtggcctggaatttcaatttgagcatctgtaacattttgcctgggggctacacattttctgaagacttctgctagccattgaagtctgtttacatcatgcatagagcagggtagaaacccaaggaatacatgtcgtgggaacagcccccaaatgtataataaacaaaaattggtagaatctaccaatctaagacatgtgctctacactgccccctggagatcctcggtggaattgagctccaaatgtctatagtggaaacatctattggctaggtgcggtggctcatgcctgtaatccccagcattttgggaggccgaggtgggtggatcacctgaggtcaagagtttgagaccagcctggccaacatggtgaaatcttatctctactaaaattacaaaaattaggcaggtgtggtggtgcacgcctgtaatcccagctacttgggaggctgaggcaggagaatcgcttgagcctgggaggcagaggttgcagtgagctgagattgtgccattgcactccagcctgggtgaaaagagtgagacttcatctcaaaaaaaaaaaaaatttcatgtgctgatgttctaatccccagtatcacagaaggtgagtgtacttggagacagggctcttcaagaggtcattatgttaaaataagttcagatatgtgggccctaatccaatacaagttatgtacatctaaaaatagattaggccgaggagggtggatcacctgaggttgggagttcaagacctgcctgaccaacatggagaaaccccctctctactaaaaatacaaaaattagccagacgtggtggctcacgcctgtaatcccagctactctggagtctgaggcaggagaatcgctggaacccgggaggcgtaagttgcgatgagctgagattgtgccattgcactccagcctgggcaacaacagggaaactccatcttaaaaaataataataaataaataaaaatttaaaaataggagattagagtgcagacacacacaaagggatgaccaagtgagaacacagggagaagatggccatcaacaagccgaggagaggcgtctcaaaaaaagccaaccctgctgacatcttgatctcagaccatgagcctccagaattgtaagaaaattaatttccattgtttaaatcactccgtttgtggtaccttgttatggcagccagaacaaatgaatatacttttatagaagtcatgcttcatgatttctcataattctccagatgtgttcacagacacaaaattttccattcaatgtgcggaataaggcttccatttctaatcgtgataacataatgaggatgggatttaccctcccacattaaacaactaaatgctaaatgacatgtatgacattatgagttacagatattggagaataggcattgaatatttatgtttacagtgatttctaaaaggagggaaaggccggacaaggtggctcacgcttgtaatcccagcactttgggaggccaaggcatgtatcaccttaggtcaggagttcgagaccagcctggccaacatggtgaaaccccatctctactaaaaatacaaaaatcagccaagtgtggtggcatgtgcctataatcccagctactcggtaggctgaggcaggaaaatcacttgaacccgggaagtggaggttgctgttagccgagatcaagccactgcattccagcctgggtgacagaacaagactctgtctaaaaaaataaaaaaaataaaaaataaaaacaaatagaaaaagaaacctaccctatcaacacatagaccgtagacttctggcctccagacctgtgagacaataaatttatattgcttaagccgtccatatggtggctcttcattatgacagctctagaaaatggagacagagaccaagttatctagaatgtatgaggcaggctgggcgcagtggctcacatctgtaatcccagcactttcggaagccaaggcgggtggatcacctgatgtcaggagtttgagaccagcctggccaacatggtgaaaccccgtctctactaaaaatacaaaaaaaaaaaaaaaaaagaaaagtagctgggcatagaggcaggcacaataatcccacctacttgggagactaaggcaggagaatcacttgaacccgagaggtggaggttgccgtgagcggaggctgcgtcattgcactccagcctgggcaacaagaacaaaactttatctcaaaaaaaaaaaaaaaaaagaatttatgaggcaaaataccacagggtagggagctacagtggggttgggaagcggggaaggggagagattggcagagggtttgattacttatcagcaaatgcttgcaaggagactaaccaaaactaggagaaggctcctaaagaggagtaggcagaacaatcttctgagttcacacagaactggaaatagcttgttcctattgtccaaatggtttgttcctattacccaattttacctgaagttctgtgtgttaggggagtctgatatacagattccctgtatgttagagcagattttctgtaaacaggctctctgtatgttagagcagactctcctaacatccagaatttcaggtaaaattatcaggagagtattatatcattaatggggccaaatgagccctagacgaaagagaattccgtgaccactctattcaatcttagaatcaagacttgaatgtatcaaactgtttccaagtcacttaattatgtcccctcaaaagcctaaaactgtttaaataatttttttgaaaagatacagcactcataatttaaaattcaccaagaatggcattcaaacaaaaaatagcaggcatgcaacaaagcaggtaaatccaatcaggtaatatacacacatcctactatttctgtctctccagaaaccctgactaacacagcctcttaactaccaaatccagcagtctctctacttggcgtttctgtttgtttttgtgtgtttgtttgtttgtttgtttgttttgttttgttttttgttttgagacagagtcttgctctgtcactcaggctagagtgtagtggcatgatctcggctcactggaacctccacctcccaggttcaagcgattctcctgcctcagcctccagagtaactgggattacaggcacgtgccaccatgcctggctaatttttgtatttttagtagagacggagtttcaccatgttggccaggctggtctggaactcctgatccacccgccttggcctctcaaagtgctgggattacaggcatgagccactgtgcccgtccttctacttggcctttcagcagaagctgatcaacctagttggcactttctgtcctttgatgtcctggacattcatctatccaggaattctcacctgcttatctttgagtcttctcgtctatctcatgtatcttcctcctcccaatctttagattacaggcgtgagccaccacgcctggcctgaatttgcttttcctgtccctgaattaactgaagttttattcaaaattttgtgtataggtacatttgtctgggaaaaagggctttagctttcaacaaaattctcagagggatccaacttcaaagatgctgagaaccattgctctggggattttcaagagaaaatagaattcaggcttaaggaagaactggtttgaagtataattggcaattaaaatgtggactaggctggggtgacttctaagcctttgtgtccccatccagaatgtggagactgtggctcctacatcctggtggtccctacctcataggtgtttgcagagggcctggcacctgtgaagaccctccttactgagtggcctctattctgagagcatggcctcaaggactctggagagaattatggagagaccacgtgtggaactttcttcctcctgtcccaacgccccctcttcctcttcctcctcctcctccctctaccgcctccttcctcctccacagagctttattcttaatccattttacttatcactgatcgttatttctgtagcttgaagtgtctccttcgtgtagaaaactccaatatccctttctcctgcttcaatctctcctgggctcaaaattcctatttccaattttctattgtatgtctcaattccagtgtctgaccagcacctctaactaacagatttaaacccgaattcattctatgtctcgctccaagtctgttcctctttctcgccatccatctacccaacctcccaaatgggagacctctaattcatccttatttctgctttctcacacacacaccacttccacatctatttgggcctcaagtcttaccaactccccttacaaacatttctaaaatctggcccacttcctttagcagtgttcatgtttttatttttttattttgttttattttttgagatggagtctccctctgtcacccaggctggagtgcagtggcatgatctccgctcactgcaacacttgcctcccgggttcaagcaattctcctgcctcagtctcccaagtagctgggattacaggtgcccgccaccacgcctagctaattttttgtatttttagtagagacggggtttcaccatgttggccaggctggtctcgaactcctgacctagtgattcacccaccttggcctcccaaagtgctgggattacaggcgtgagccaccgtgccaggcccatatttttattaactcccacttagaccattcatagccctgttgctattctttctgctgctagtttcatctcactgcagttatctttaccttcaacttttgttgtcctgataagtattttctgtcattcccagcttgaagtcctttccactgctgccttgagcagggttaggaaatcagtggctttgggccagttctggcccagtatctgtttttataagtaaagttttattagcacatggccacacacattcatttacttttatctgtggctgcttttttttttttcttttgagacaaagtctcgctctgttgcccaggctggagtgcagtggcgcaatctcggctcattgcaagctccgcctcccaggttcaagtgatcctcctgcctcagcctcccgagtagctgggatcacaggtgcccaccaaaggtctggctaattttttgtatttttagtagaggcagggtttcaccatgttagccaggctggtctcaaactcctgacctcaggtgatccacccacctcggcctcccaaagtgctcggattaggcgtgagcaaccgcacctggcctcagcacatgtttctaagctgtgaactctatggggaaagtaactgaggtagttcccctagtcccctaattattaatgtatttgcaacacaatgcctgacacacagtgggtatttttaaaatatccatcaaatgaataaataaataaaataagaggtaggattttagagcattatataaaagcatatattttcaagatgactaagtcaactccatcttacccacaatattatttttacagtttttaaaaacatcatttgaaaattttatcagagaagtaattagtaccttccgagcacttaactatgggtgaacactgatcaaattgctttgttaagtattaactcatattattgtctcaatactctgagacaaaaaaattttaagggccaaattttaagctatgcagtcaaatctctattgcaattacaccattctgccattgtagcgtaaaagcagccacaaacaatatataaatgaatagatgaggctgtgttttaataaaactttatttacaaaaacagaaggtgggccagatttggcctgaggactgtgtcttcccaacctctgcctattttcaaatgaaacaccaagaggttaaaatctggcccccaaatctcacagcgagtaaaaaataaaattggatttgaacctaaactatctccagaaaatgtacttactcttaaccataaaactatactatttctcaggaaaaaaaatttaaatataaacagagtgcttttgtaactttctagctgtgtgatcatagtgttttagggttaacaggagacttagagaaccatctagctttaaatcttcctggataatatgatggccaggatcatgataaagataaaagtgaacattgttctctgagtgattaattcataatcttttatgttttgtcttgctaagttcttactaaatcctatgattaggcccctgttttgcagaggaagtttaaaaaggggaagccacaagagatctattgtaaaacatggtgatcatagttgcatggtaacaatgtatgtattcttaaaaacttttaaaagaatacgttagtgttctcatcacaaacacacacacacacacacaataaagctgagtatgtgaggtgatgcaaatgttaattagatcaactgagccattctatgacgtataatatttcaaaacatgctgtacagaaaaaaaatatacatatactttatatttttcagtttaaaaattaaatttaaataaattaaaaggggaagtcacttcaacaggtcttacagcaagtagggtgaagagctgcgattcaagcgcagatcagtgcagcaaacccactgcccaccaaaaatgcaagcctcttccccaccctcaaatccagagtatagatttgtcactaggaagtggcttcccagacagagaccacatttcccaactgcccttgcagttatgtgttatcatgtgaccgagtcctagccaatagagtgtgaggggaagtgatatgcaccacttcatgatgtggcacatgttaacctcccccatgggaactcagccatgttcttttccccctccgggttggctgatatgtgaacaccacgatgaccttgggagctgtgtatggaaaatgacagagcctccctcaacctgagggtgcaggatagacactcttcagacctgtttgctcaccctctactgatacataaggaaaaaataactcctactgtggcaagcctgtgacattctggagttgatcctaacaaccgctaatgttaccctatttaataccatcagcctgacactccatcactttgctaaatggcccctcagaatgtaaaggtcttattccaacttctataggaggacaactgaaatggagctcatacttttcctctctacatcatcactgctgactaatgccttgctctccatcttcttgtgggacaagatggctggattcgttatggcaatgaggtaatttgggtaaattacctacctcaggctcagttctgttgatgcccgtcaggaacaggaggtgggccaggaagaggcagagggagagctctagatggagggaggtgctggtgttctggatgggccggcacaggaggaaggtgaggatggccaggaagaggcacagcagagagatggtcagccccacctgggtgatcacggtcagcacagggtcctcctgcaaaacaccaaagggggaatccattatggtgtccgatggtgttgttattttcctgaggtagtgccagatgggcttcctagttcagtccctgaaacaattgacttacctttctgagacttagtgttctcatcttcaaaatgagggcagtagtaacactcatcacacaggaatgttaaaaaccaaaacaactagaccagtgctggatacagctcttaacaaatgactaatgggagttagtgtataaatactccagctcccttgctgctcagatagaatgacccagagatgtgagttctacactgactcccagagtcccccagagggaataaattccagttacctatggtggtaactggcttgataatgctgtctgcactgacacctgtcttacttccatctcattgtctcagtcccccactagtgtttcctgtaatcccctttcaagtaagctactaccatttgactccttgtcttagaatcttttttctttttcttttcttttttttttttacatggagtcttcctctgtcaccgaggctggagtacagtggcatgacctcgactcactgcaacctccacttcctgggttcacccaattctcctccctcagcctcctgagtagctgggattacaggtgtgcactaccatgcccagctaattttgtatttttagtagagacggggtttcatcatggtagccaggctggtcttgaactcctgacctcaagtgatccacctgcctcggccccccaaagtgctgagatgacaggcgtgagacaccgcgcccgacctttagaatctttttgtaagaaatgcagaggataactcacaaattctcggacatacacaggttcacaggaatgaatcttggtaccttgggggcaagagccacgaggacggcaaagctggacagatggaagcacttgcatttggtgtaagaaccgttgctgtgcacatgagagcagccctccgtggaccagcggcctccctctgatccctcccagtagacacagatatgttttgttctcttgtcaccaggctggaaagagaatagtatgaaagtgggtctcttcctggttttattttttattttattttattttattttgagatggagtcttgctctgtcacccaggctggagtgcagtggtgtgatctcagctcactgcaacctccgcctcccaagttcaagtgattctcctgcttcagcttcccaagtagctgggactacaggtgaacactaccatgcctggctaatttttgtatttttagtagaggtggggttttgccatgttggccaggctggtcttgaacccctggcctcaagtgatccgcctgcctcggcctcccagagtgctgggattacaggcatgagccaacatgcctggcatattatttcaactttacaggttaatcacaatgcacagtgttggaaactggatcggaaatacacttgtaggggaagagtttcacatcaccacgcctgcggtgggtttattctccatctattctgcccttctctggtcagctcagcaccctggggttgaccctctgaatggcttcgccagcttccttgctatttatagaagcaaagagaggcattggtgagactcactgggtgagagaagagagagaaataaagtatttcttccctgtgccctttctgctttgagccatctccagtttctgcagagcgatccctcattcctgcctccagcttccactgagctcaatagagcttctcctccattgccttttggcttcaacgtgagaatggcatctcactgtggcaagctctggatgcctcaacacttcctttcttcctgagctttactaaagtgtgattaacaaagaagaatttgtatttatacgttttgatagatgtatacatttttaaatgattactacaatgaagctaacacatccaacacctcacatatttttgtgtgtgtgtgtgtgtgcgtggtgaatacacttgcaatgcactctctcagcagatctcaagtgtacaatacattattaagtgtagttacattgagtgttgtacattaggctgggcatggtggctcatgcctgtaatcccagcactttgggtggctgaggcaggcagatcgcctgaggtcaggagtttgagaccagcctggtcaacatggtgaaaccttgtctctactaaaaatacaaaaattagccaggcatgatggcaggtgtctgtaatcccagctactcgggaggctgaggtgggagaatcatttgaactcaggaagcagaggttgcagtgagccgagattgcaccattgcacttcagcctgggtgacagagtgagaccctgtcccttaagaaaaaaaaaaaacaaaaactattggccaggcatggtgtcttacacctgtaatcccagcactttgggaggctggggtggacggattacctgaggtcaagagttcgtgaccagcctggccaacatggtgaaaccccgtctctactgaaaataccaaaaattagctgggtgtagtggcacactcctataatcccagctactcgggaggctgaggcaggagaattgcttcagctggggagatggaggttgcaatgagccgagatgacgccactgcaccccagcctggccgacagagcgagactctgtctcaaaaaaaaaaaaaaaatcttcattcatctgttgacagatacttaggctgtttccatatctcagctagtgtgaataatactgcaataaacacgagagtgcagttatctctttgagatcctgatttcaattcttttggccacataccccaaagtggaatcgctggaacagacgataattctgtttataactttttgagaggcctctgtactgttttccataatggctgtaccacattacattttcatcagcagatctataagggttcctcttttttttttttttttttttttgccacatactgatattttaagtttttggtaatagccatcctcactgtggtgaagcaaaatctcattgaagatgcctcagcgtgtcttgtgtgttctcttacttctgaattccgtttcctacttgggaagctgactgcacctgctcaccctttaaggtactgcatggagacccagccctgggtgtttctcacctgattatggcgaaaagtcaggaacacaggttcagagagggaaattttttccttcaaaccgacggtgccgctcacaacgtaagagttcagttttacttcctgcatcccttttcgtttactaaaaaaggatgcattcagaatatccccaagagattgataagtgatagggcaactgcagtgctctctgaagaaaaaaatggaaaagaaatactgttagtggccatccatagtttggagagaaagtacagtactctctaatgtgagggtcgtagggcaggcaatgaatggctaaaactgcccttggaaatcccttaaatgctgttcaatacaccgtgtgtcgcttggggtgcagcatttttgtctacgtaatatgtattataatgccccatacattataagcggtgcaaaatatgtgcaaaatatgtgcaaattatgctcttcagagtcctaaaaatatatatgagcccttgagcattacaaccagagttgtgaggcaagatgcttgtcctcagaagggcacatggaactcacgcaggctaagaaaaccacactctctcagccttcacctcaagctcactccggggtacctaatttagtggaaaggtatgcagaatgacccactgtatttaattaattcactcattttttctctttctcatcttattacccttcctctccctgtcttccttttccccctccccttttcatgaagccaccgtttaatgtatagaggttcaggccgggcgcggtagctcacacctataatcccagcactttgggaggctgaggcaggtgggtcatctgaggtcaggatttcgagaccagcccgcccaacatggcaaaatcccatctctactaaaaatacaaaaattagccaggcgtggtggcgggtgcttgtaatcccagttactcgggaggctgaggcaggagaatcgccggaacccaggaggcggaggttgcagtgagccgagatggtgaatggagaatccgactccaaaaaaaaagaaaaaaaatcatggaggttcagtgcacacaggacacccgtatgatgggagtgtttcccaaattgcagttatccacgtgctaccatcccatttttgaccaaagctacttatcatctgtatttctatttgctccatttaaaaaatccaacgcggttgggcgtggtggctcacgcctgtaatcccagcactttgggaggccgacgcgggcagatcatctgaggtcaagagttcgagaccactttggccaacacggtgaaaccccgtctctactataaatacaaacattagcagggcttggtggcatgtgcttataatcccagctacttgggaggctgaggcaggagaattgcttgaactcgggaggcagaggctacagtgagccgagattgtgccactgcactccagcctgggcaacagagtgagagtcagtctcaacaacaacaacaaaatcaactcatttttagatccctttcctccctttccctactctaccgctcacagtaaggagtgaagattaatgaataaccaggaattttttggaggaaatgcagcagatatttcatttttaaggtaaccaggtttttctctttgaaatagtttatatgcattcattcatttatgtttcatggaaatatttatgtatcctctactgtgtgccagacattctaggaattattatacagcagtgagcaaaacagacaaaacccctgccatcagagagctgacgatgtcgtagtgagagagatgggccaccaacaaataaataaattagaaaaaatacatagtgcaggagctttgcagagacttcaggtgatgagataaagtgtgggtgaaacactatgccgtgaaggtaaaacccagcctgccacctgcttttgtaaataaagttttatagacacacagcctcactccttcactgacacatcatcaatggctgctttcacactctgatggcagagctgagtagttatgacaaaggtcatctggaacaaaaggcctaacatatttactctctggaccttgtagagaacatttgttttccaatctgtggtaaagaacaagactcggcagctcttttaaaaagggtgtacataaacgcttctcaaggaagtgttcaaggcaatctgacaccattgagtgttaccttttcagaccattacatggaaacagagcatgcatcagccagtcccttttttttttttttttttttgagacagaatctcactcttgtcacccaagctggagtgcaatggtgcgatcttggctcattgcaacctccgccttctgggttcaagcaattctccggcttcatcctcccgaatagctgggattacagtcacgcaccaccatgcctggctaatttttgtgtttttagtagagatggggtttctccatgttggccaggctggtctcaaactcctgaccttgtgatccacccgcctcaccctcccaaagtgctgggattacaggcgtgagccactgtgcccgcccagccagtcccttttaaggaggcatttcaaggaatccttatgcaaacctttgtgtatgtcacaaaatacacaccccatgtgacagcccgacttctctctgcaaaatgcctagttagtggttacggaagatcattttattccaccatgtagaatctccctaccttaaaagctttgtgaattctcaccccagggtttaatcgcctagaaataaaacaatgatgtgtagaatttggagtcaagataattcatcggagatatggtacctcttaggtttccttttaaagcatcagcacagttgatatccatggtgttatttccagcttccagaaaagcattctcccttgtctcattgcacctcttggtttcatagactgaaaacattaagaaagtcagtcctgttctcaagtctcatacctaaataatttgctaaagaactcccttttctggaagacctcctactggtgattccatctctcctatgcaaggttggccacgtggcaccttgttcccatctttggctggtagaaatggagtggccaaaatggccttagcaacacactggccacagcccaagagaggagaagggcatgcttcccagaactggtactctgataggcaagctaagcagtttccacaggacacttaatggtaccggagtccctggttaggggagaatgcaatctttataagcaagagtagctaagcatttaaatgttttccaaaaaaaaaatagtcactaggaacagaacttctgcatttgggaagaatccctgtaaacctataaacacaagagctgatcattttgtgaggtcaacctcaacattttggggtatacagagtttgtctcagaacaaatgagaaaactgtcctaggtgctatggcagactgcttattacctgtgatcaccatttacctattctttctttgcatctagaactactaaatttaagctgaagacaagccattttccagcttcccttgcagctaggcagagccatgcaactattttcaggccaacggatcaaagaacagaatggcatgtgctaagggaaacaggcatcctttcaacttctcttctccccttttcattggctggtaaaagggtgtgatagtacaacaactctcttgtatcacaaagtgaaggtgaatgttgaagacagcagagcacagagctggcatggtattgctacatcagccctgactcacttatgctcaaactattcaagaaataatggttaagctgctgtttaccacggttataccaccagatttggtatgttaattcagacactaagttcacatggaacatttgctaaaatagaccatcagtcaagtctcaacaaattcaaaaggattgaaatcctacatagtgtgtgctcagacaactcatcaaaaagagtatatatcacaactattttttcctggtaagtaagcctggtttaacatatgtaaatcaatcaatagggttcatctcattaacagaatgaaagataaaaatcatctcaattgatgataaaatgatcatctcaattgaggtaggaaaaagcatttgacaaagttcaatatcctttcttgattaaaacccacaataaattaaatgaggccattaacacaaggaaaccttaaaaagccacaaatatttggtaattcagcaacacacttctaaataaaccatgagttaaatgatagattacacaggaaatgttttaatattttgatctaaatgataatgaaagcccagtatatgaaaacttgcaggatgcagctaaagcagtgcttagagggaaatatatagctctaatttatagctaagttttaagttttaaatgcatatattgggaaaggagaatggtttaaaattagtaatctaaataaccaagacaacaagttagaaaatgaaaagcaaggccaggcgcggcgtgatggctcacgcctgtaatcccagcactttgggaggccgaggcgggtggatcatgaggtcaggagattgagaccatcctggctaacatggtgaaaccctgtctctactaaaaatacaaaaaattagccgggcgtggtggtgggcgcctgtagtcccagctattcgggaggctgaggcaggagaatggcgtaaacccgagaggcagagcttgcagtgagccgagatcgcgccactgcactccagcctgggcgacagagcgagactccatctcaaaaaaaaaaaaaaaaaaaaagaaagaaaatgaaaagcaagttccacccaaagaaagtaaaaggaaagaaataataaagaacaaaaatcaaagagaaaggaaatggaataataatataaataatcaacaaagccaaaaattggttctttgaaatgattaacagatacagaggtcagaaagaaaccagagttcctgacatagagttcctaaaacccttagagtttcctgagcaatagaatcactaggaaaatcttttgttctgatatttggtcttggactcaagttgctgacatatagtccctaagaccgttgtaatttcctgagtgacaggagtgtgtgactcaactctgaaatcctttgtactttcttggttatagaaatatcttttattctaatgtagtgactcttagccagctcctggatagcctcaggatgggggtggttgccaaggaaaccaatggtgagattaaagggttggaactttcagtttcacccccatcccagatacaggaagaggaggggggctaaatgttgagttggtatcaatggccaataatgtacccaatcgtgcctaactaacgaaccctccatacaaatccaaaagatttgttaagctgtctaggagattctagattgctgaacatgtgtgggtccccggggtggcacctctaaagagggcttggaagctctgcacctcttctcccataccttgccctgtgcatgtcttccatctggctgttcatctgtatcatttgtttatatatatatatgtgtgtgtgtgtgtgtgtgtgtgtgtgtgtgtgtgtgtatatgtgtgtgtatatatatgtatataaatgtgtgtatataaatgtgtgtatatatatacacacacatacacacatataatatatataaatatatatttatgttttatatttttattttaatatatatattttttgagatggagtctcactctgttgctcaggcttgagtgcagtggtgcaatctcagctcattgcaacctctgcctcctgggttcaagcgattctcctgcctcagccccctggggagctgggattacagatgcgtgccaccatgtccagctaatttttgtattttttttttttagtagagatggggttttgccatgttggccaggctggtcttgaactcctgacctcaggtgatccacttgcttcggcctcccaaagtggcatgacccaccacacccagcccatttgtaatatatttttaataaatggataaatgtaagtaaagtgctttcctgagttaagcgagtcactctagcaaattactcaaacccaaggaaggggtcatgggactctaatttactgcctgtcagttggacgtacgggttacaacctagaacttgggattggcatttgaggtgaagaatacttttgtgggactaagcttgcagcctgtgggatctgacgctctctttggttgataatgtcagataatgtcataattgaattgtagaacacccagctggggtccactggagaactgtgtggtcagtgtggaaaaggagcccacaataatttggtgaccagagatgaagtattccgtgttcttgttactatgtgagagtagagtaggaaaataaccgaggttttttctatcccctagccatggtggcatagcgaatatgctcttaaatactttccatcataccaagggaagttgaaaagaagaagagagctggtttattctcttgtcccttgaatttgcatttttgaaaatggagtccttctcatgtagaatgttggtgtagagggtctgtgatcctgagagcccacagatttcatcattcagaaaccctgacaaagccaggacccagacgtctttatggtctttatggagggtcataaagactctactcagcctctcttacctatatcaaattcagaaatttgaccctttcctggagaagcaaaactcgcattccagatgctcaactccacgctttgaattagttgagtagcccttcttgcaaagtcctctctgcttccatttcttctcagattttccttccaaaaaaattaagctaattagattgactcttactgaaatgtaagaaatagggaatatgcacaagtgttggagtggggagcccagaaggcaacgatatttattaaggtgctacaaggtgcgtgtggcattgagaatctaggtgcttgatgtaggtctttgaatgccagctgaggcactttccccctacgcttgtatttctctatctctatggacatgtggcactaggcacttcttgattgtgggaggctgtcctgggcactgtaggatgttgagctgtatccctggtctccatccaccagatgccagtcacacacatcacccccaaggtatgacaaccaaaagtgtccccagacattgacagatgaccttgggacagaggacaaaattacccctggatagaactaccctaccctaaaaatcacaggaagacatgttaatgtttgggtaggaaaatggcatagttatacgtaccagctgtttcccaaatccaggcttcaccccactcacccaaatatccacgtttgactgtgtcgtcccttgactattgttctctgtgaaagaaaagatgtcattgaaagagatatgggagaaaatacaccctgcttacatcccttcttctagtcaccctcaagttgagtctttccctaataattctgcagcccatcctaattcccctctaagaagcctaaaaggtattgcacagtagaattataaaagagaattagaatgggtcttccagtttcatattgagttggtgcaaaagtaatggtcatctttgccattgaaagaaatggcaaaaaccgccattacttttgcaccaacctattgctttagtcaacactgtttattcggcacctactcaataccaggcacaacgctgaactatatggatataggctaggaaaagaaaccaaggtatccccttgtggaatctgaagtctggcaggaaagtcattaagcaagttattatcaataaataattaagcaattgcaagggacgctcttaataaatagaacatgacatgtggacaaaaagatgggaactatagacagtggggactactagagggagagggtgggaggctgatgagggctgaaaagctacatatcaggtactatgcccactacccgggtgatgggaacattcttacaccaaaccccagagacacgcaatttacccacgcaacaaacctgcacatgtaccacccccaaacctaaaataaaataaaacaggacttcccaaaatcaatcaatcaataataaataggacacaatggtgtgggagtatatagcagagggtcccaacacatcagggtgacatggaagaaatcagtgttaattgagttaatattatagaagcagttgcctacacatcacagtatataacgtgccttcatatatattatctcatttcaaggaacactgaaggttgtagaaaaggcatatacagcataatatccagtattaactgacccttcctaggtgcctaggactgttaaatatttcacatacattaataatgagtaggggccgggtgcagtggctcacgcctgtaatcctagtactttgggaggccgaggcgggcggatcatttgaggtcagcagttcaaggccagtgtgggcaacatggtgaaaccctgtctctaccaaaaatgcaaaaattagccaggtgtggtggcacatgcctgtggtcccagctactcaaggctgaggtgggaggatcgcttgagcctgggaggcagaggttgcagtcagccaagatcacactactgcactccagcccgggtaacagagtgagaccgcatctcaaaaataataataatgaataggtaaggtgtattaatttgctagggtttccataatatagtgacacaaattgggtggcttaaagcaatagaaatatattgtctcatagttctggagggcagaagtccaaatcaagatgccagcaagaccatgctccctctgaaggctccagggaaacaccttgccctgcctcttccagcctctggtggttgccatcaatctctgacattccttgccctttggcagcataattccaatcttcacctctgtcttcacatggccatcttccctgtgtgtgtgtctctgtgtccaaatatccttcatcttataaggacaccagtcatgtaggattcagggtccactctgatctaatatgaccacatcttgacttattacatctacaaataccctatttccagataagatcacattcacagattccaggtggaatcagtttggggagaacactattcagcccagtaagaaggaatcagaaatggctccaaataatccctgcctcttggaattcacatccttgggtaatcttcccttgactgtggactggactaagtgactcatttctaaggaacagaatatggcaaacatgataggatgtcacttctgagagtgggttataaaagactatgactcctgtcttattcatgctctctttctggctattctaatgtgtttgctataacaaagcaagctgtagagacccacatatctaggaactaaaggctgcctcccaccagccaccagaaatgaactgagggtttcagtccaatagctctgaaggaactaaattctcccagcaaccttgtgagtagcttggaagcagaacctgccccagtcgagtctccagatgaaaccacagcctggataaaacctcaattgcaactgtgatagacccagaagcaaaagactcagctaagccatgcttagttccttaacccaaagaaactatgaaacaatacatatgtgttgttttaggccactaaatttggggataacttgttatgcagcaacacagaactgacacagtagatactattaatattactactcccatttaaagatgaggtatatagaaattaagtcattaactgaaaaccagatggtaagtggaagatttagcacttaaatcccatctctcttacccaaaaagtgaaataatactggaattaaacaaataaataaattgtggatagtgagagacaggtttctcattgttggagaaggaagctacaaataaggaaagagggaagtttccgacaagccttgatgttgaactggaaccagaggtatcagtgtgaattcgtcagatttagtagataggtagatagacataaaaattgaatttaaggtgagtgagagatgaataaatagagaaattcagaagaaatttagagctgcccttttggaagctcaggaaacagacctgtattggacacatacatttggaagcatctatatagagatagttattgatgccaaggcttggatgacaccatcttggaaaatatcatcaaagacaacaaaggaatgagggacgagggttaggatggagctttgcactcttaccctggcctgaaattagagaatctctcagagtctcccccaagtccccaccatttttcatagtggaaataggatttggaggttcttaccgtaacaatccggatgatcataatctataataccagccagaaagttgaataaagtatattttaccaaacagctacagatgtaacctccaactttattcctacaatatgctttatacttgcactttgccagcccggtttcacattcattaatatctgtgaatcaagagaaagtgttgctttcattttcatagaattataccatttcccttgcccatgaaatttttattgcccaaccattgtccatcaatgttctccctaagttaatttataaatccaatgcaattccaattttaaaaacatctacatgtattttacggggtgagagacaagttgttactatcatgcaggtgtagccagaaaaaactacaaggtgggaaccagacattaaaacaaagtataaagctgcaactaaacaaagaggtactgatgcatgcataaataaaaatagactaatggaatagactagaagtccagacacagatgcaagtacctatggagctttagaacatggtaaaggtggcatgtcaaatcactagaataaggatggaatgttgctgtttttaatgttgtttttaagtcacgccatttgctaaatcaatttaacacacatagtgcatagcaggggaataaatatacggtaagttaacacactattagaaaagcttgagagagatgaggaaggaccacactactaaaatcctggctcagccgggcacggtggctcacgcctgtaatcccagcattttgggaggctgaggcgggtggatcacctgaggtcaggagttcgagaccagcctggccaacatggtgaaaccctgtctctactaaaaatacaaaactttgctgggtgtggtggcacgtgcctgtaatcccagctactcaggaggctgaagcaggagaatcgcttgaacccaggaggcggaggttgcagtgagctgagatcgcgccattgcactccagcctgggcaacagagtgaggctctgactaaaaaaaaaaaaaaaaaaaaaaaaaggcggggcacggtggctcacacctgtaatcccagcattttgggaggccgaggcgggcggatctcgagtccaggagattgagaccatcctggcgaacatggtgaaaccccgtctctactaaaaacacaaaaaattagcaaggcatggtggcaggcgcctgtagtcccagctactcaggaggctgagatagcaaaatggcgtgaactcaggaggcggagcttgcagtgagcagagatcgcgccactgcactccagcctgggcaacagtgacttatgcaatgtttatgtgtcttgcctctcccaaccacatcagccttccgtgctgaatggaccagagctgaggttcaagcaagggacccacaggcagaaggtgctctggaccacagacttatacttgtgctctccatctgaaggactcagggacaagcacacctggccaatggctgtactttgtcaaatagtctgctgaagaggtacgggttttatttgggctatgggtttatgtgttttgggcagaggacacatggaacagaatagttatcactaatgagagattaaattaaaaccccgttaatatttttaccttcacacttctcagaggaatcatgaaagtatgtcctgccagacctggcccgaaagccatcttcacaagtacagtgggtgctgttgtggcagctggcatatttagggcatggaggacaggaagctgcagagaaacagaaatattcagtatgcatctaccacgtaccgatgctgcggtcagaagaatgtcatcttaggaatgcctctgttggcatccttttggcacccagcccattgctgaacacagtggcacacagtgcccagccgtgtcccacttctgccaccaacaccacttttgccagataggtgaacctccaaatgccggcacctgtgtttctttccttgcaggctaaccctggctaccagaattctctttgttcatcacatggcaggttaacaatgcctttcctaagtagctccctttatcaatgattgatagaagatagtgcattaaaaaaaagccaatttcattattatttaaaaaaaaaaaacagaaaataacaagtgttggtgagaatgtagagaaaatggaaccctggtgcactgctggtagaaatgtaaaatgatgcactgtctatgagacacagtatggcaattcctcaaaaaattctaaatcagaattaccatatgatcttaccatatgatccagcaatcacacttctgggaatatatgcaaaggaatcaaaagcagtgtatagaagagatatttgtccactcatgttcatatcagcattattcataatagccaaatgttgtatgtaacccaggtgcccacgaatgaataaatgaatgaacaaaatgtggtccatccacacagtagtacgttattcagcctttagaaagaaggaaattctggccgggcatgttggctcacatgcctgtaatcccagcactctgggaggccaaggtgggtggatcacctgaggtcaggagttcgagaccagcctgaccaacatggtgaaacctcgtctctactaaatgcaaaataaataaataaataaattagcctggcatggtggtgcatgcctataatcccagctacttggaaggctgaggcaggagaaacgcttgaacccgggaggtggaggttgcagtgagccaagattgcaccattgcactccagcctgggcaacaagagtgaaactcagtctcaaaaaaaaaaaaaaaggaatgaaattctttttttttttttttttttttttttttgagacggagtctcgctctgtcgcccaggccggactgtggactgcagtggcgcaatctcggctcactgcaagctccgcttcctgggttcacgccattctcctgcctcagcctcccgagtagctgggactacaggcgcccgccaccgcgcccggctaattttttgtatttttagtagagacagggtttcaccttgttagccaggatggtctcgatctcctgacctcatgatccacccgcctcggcctcccaaagtgctgggattacaggcgtgagccaccgcgcccggccaaaaggaatgaaattctgacacatgctacaccataaacgaaccttgaggacattatgctccatgaaataagccaggacaaagcgtcaaataatgtatgattccactcctatgagatccaatcccagagttgctggattcatagagacagaaagtagaatggcgggtgccagggccttggggaggaggaatggggagttcgtgtttcatagagacagagtttcagttctgcaactagaaagaacactgtgggtggatggtggtgatggttgcataacagtgcaaatgttgaatggcattgacctgtacccttgacaatggttaaaaagctacattttacgttgtgtacattttaccacaatttagaacatagtcataatcaatagcttccttacccattgaggggtacaaatctgaggtgcctgctccatgccatacccaacagctgcctccagggattaaactccagctgcccgcatctaacttgcttgataaagatcctatatgagctcctccccttcctatgccactgcccactcccagctggtgcctcctaggattccctcccagaacaacgagttgctctcagggtcggcttctgggggaacccaagcaatgacttgtggtgaaggcaaagtatttcctggaatgactcaagacacaggtttggggaaagaaagaggacagtctagcatccaccagccatgtgaccttgagccagccacttctctggaggacccttgatcaagtgggtataatgcccatgctgagtttgtaggattgttgtggggattaactgagatggcacgtgtgatgtgctttgctatgtaaatgcagatgatggtgatgatggagatgggaaaacagctcttgggacctccaaagagtcagaagaaagtgccagagactccatgctctgtctcttgaaaaagctccttccctcctccaaaggaagcttccagatcccaatttcctttcccctggcctttggctatgaatagactcacctccagaattcttggcttctgatcctggcagagccagtaagacagtgagacctggaacagagagaggaggggatcattcagacggggatcccctggactctgcgtggctgaagactaggtgagttaggggcaactaaccctaactctttgcccagtcacacgtgcaagcttcaccatagcatcttccaggcaggttacaaacacaagagtcacagatttggacatcacatccttctgaagtatgagaagtgcatctgattgcagctgtgtttcccaatttcagaaaactcagcagcaaattcagcttcttctctacatcctagcaccaaaagaccaagttggcaatctcctttccatattcaacagtttattttaatatcagtccagacctcgaaccacacactgtccgagaaaaatataatggaaaccccataggtccttttaaattttccattaccgacaattttttgtcttttgagacagagttttgctctgtcgcccaggctgcagtgcagtggcacgatctcagctcactgtaacctccgcctcctgggttcaagcaattctcccacctcagcctcccaagtagctgggattacaggcacccaccaccatgaccggctaatttttgtatttttagtagagatggggtttcaccatgttggccaggctggtctccaactcccgaccttgtgatccgcccacctcggcctcccaaagtgctgggattacagctgtgagccaccacgcctggctgacatggacatttttatgacctaaaacactcaacaccaattttcctgtgaataattttttttcagagagaaatatcacttgattcccatagggtaggggacagcaaactggacttatgagttgaggtgacttttatattttttacataaaacattttaaatggttggaaaaaaacaaaagaagaagaatacttaatggccatgaaaaccatgtgaattttagctgcctatgtctgtaaataaagttttactgacacgcagccacatccattcatttacatgaggtctatggatgctttagggctggaatagctgagttgagtagttaagacagagaccatacgggccacaaagctgaaattcaaattacctgtccctttacagaaaaaaatatgcttgccccttacatagagtatggaacatcacttacctgtaaggtctcttaacaaaccttccatccttaaactgcatctgatgcctcctatggagatttctttttctcatctctaagaccctaaagcccagaggacagggtgggaaggtctaggttgtaacttactgagctatgacgctccaagtgcggacccatttggtgtcaatccatgtagcagatactcgaagtgaccctttagcctaccccagagagggttcctataaatgcagatgactttctttttcgttctttctttctttctttctttttttttttttttttgagacagagtctcactctgtcatccagggctggagtgcagtggcggaatcttggctcactgcaacctctgccttccaggttcaagtgattctcctgcctcagcctccagagtagctaggattatgggcgtctgccaccacgcccggctaactttttttttatttttagtagagacgaggtttcaccatgttggccaggctggtttcaaactcctgaccttaagtgatccacccgtcttggcctcctaaagtgctcttcactctttcttgcgtggcctccccacaccctcctttcctgggatcccctcccaaaaaaactatttacacacatgagtccttgttttcgttctgctttggggcagcccagcctaactgactcaagaggagagtttctactaggacaggcacacgcagttattgctggagaaaatgccaaatttgaggaagcaaatcaagcgaggacaccaggggcatgaggagaaggaaagggagttctttgctccacttacctgagagcaggaccaggaggaacctgctccccatagcactgagacgccgggaacaatctctctgaagcaggacgtggtcagaatgcctggaacaaataaacctcatgaaatccaatttctgatggtcccaagttcagaagccccgtggccagtgcttatcaaaatgtaaggctgaggcaggagaattgcttgaaaccaggaggcagaggtagcagtgagccgagatcgcatcaccgcactccagcccgggcgacagagcaagactccatctcgaaaccaacaaaccaacaaaccaaccaacaaacaaaaaaaaccctttaatctctccctctcgtttgacccaataattctgcctctgggtaactctctcaaggaaaacaccctgcgaggatgatcttagcgtatttggttatagggaacaagtttatcacccaacaaatgctaaaaaaaacggatgcatctgaggaaatataaggctggaatttaaaatcctgttctatcgcagtcggcaagatcaagactgcaaaactccacaggacaaactactcactttttatttatttattattattttttttttacattgctgtcattgatttgtttatatttaatttttaaattcataaataattatatatgcttatgggctataatatgttttgacattgtggaatgattttttttttttttttgagattgagtctggctctgtcgcccaggctggagggcagtggcgcgatctcggctcactgcaagctccgcctcccgggttcacaccattctcctgcctcagcctcccgagtagctgggactacaggcgcccgccaccacgcccggctaattttttgtatttttagtagagacagggtttcaccatgttagccaggatggtctcgatctcctgaccttgtgatccacccgcctcggcctcccaaagtgctgggattacaggcgtgagccaccgcccccggctgacattgtggaatgattatatcaagacaattaacgtatgtatcacctcacatacctatcatttttcggtatgagaacttttaaaatctactctttcagccattttgaaatacacaatataggccgggaacagtggctcacacctttaatcccagcactttgggagaacgaggtgggcggatcacctgaggtcaggagttaaagaccagcctggtcaacatggtgaaaataatataatatataatatattattaatatataatatattattaatatataataaaattaatatattaatataatatgttaatgtaatacatcaatatattaatatactaaatcaatataatacattgatatattaatataatacattaatatattgatatattaatataatacattaatatattgatatattaatataatacattaatacattgatatattaatataatacattaatacattaatatattaatataatacattaatacattaatatattaataaatattaaatatatatttaatatatatttatataaaaggttactatctgttttaggaaaatgttagcattctatatacaattatccatatatgcatgtatgtgtatttatatgtgtatatacaaaatcatacatacaaatgtacaaacatataaatgcatcaaatgcatgtatatatgtatgataattttgtatttgcataaaatattcctggaaggtacctaagaaactcatagcatcggttgcttttgaaaacaaatgtatgcgaggcttaatacctaggtgatggattgataggtgcagcaaaccaccatggcacatgtttacctatgtaacaaactcgcacgtcctgcacatatatcttggaacttaaaataaagtaaaatttatttatttatttatttatttattttgagacggagtctcactctgtcgcccagactggagtgcaatggccctatctcggctcactgcaacctccgcctcccgggttcaagcggttctcctacctcagcctccccagcagctgggataacaggcacctgccaccacgcctggctaattttttgtgtttttagtagagacagggtttcgccatgttggccaggctggccctcctcagcctcccaatcccaaaatgctgggattacaggcgtgagccactgcgctcagccgaaaataaaacaagatattttaaaaagagagaaagaaagcaagtggctgggaagccgaggcaaggagacttttcagtttaccctcttctatcttttgaatcttgagccaagtgaagatcttttctgttcaaaacataaatcatttctaacagagaaaatagtggaagtactagacattactataaatgagcctttcttaccgtgtcgcccaggctggagtgcaatagcgttatctcttctcactgcaaactccgcctcctgggttcaagcaattctcctgtctcagcctctcgagtagctgggattacaggctcccgccactacgcctggctaatttttgtattttttaagtagagacagggtttcaccgtgttggtcaggctggtcttgaactcctgacctcaggtgatccacccacctgggcctccgaaagtgctgggattataggcgtgagccaccaagccaggcctaaatgagtctttcaaagaagactttaaggatcattttagtaagcgttggcctatggatatcaatttaaaatgcagaaagcactctcctaaggtaatgtcggtggccaattggggtttaagataaaacctccagtgcacattagcaaagatattgtgctctgcagatctgtgaagcctttcaaaggcgctgccaatgatgagggaggcactgatggagaagatgctttaagtagtttgcagaaaagtttcacaaaatgtaagcaggaaggaaaacaacaattacgtgtaatgcaaacaatctgatatcacatgcaaaaataatgttgtaggaggctattagaacaacatagggccgggcacggtgggtcacacctataatcccagcactttggagggcagaggcgggcagatcacttgaggtcaggagtttgagaccagcctgaccaacatggtgaaacaccgtctctattaaaaacacaaaattatccgggcaatgtggtgagtgcctgtaatcccagctacttgggaggctgagacatgagaatcacttgaacctaagaggtggaggctgcagtgagctgagatcaaaccactgcattccagcctgggtgacagagcgagactctgtctcaaaataaataaataaataaacaaccatagaaagtgattatgacgtagcattaggagcaaaaggaggttatattattctgtcattacacattgtatgcatgtatcaaaatatatcatatgtaactcataaatatgtgccactattatgtatcaatacaaaatgtaggttataaagaaagtatattacatgtaagagaatcttaaatgttaatagaagaatgtcagtatgagtgattttaaatttctcttttttcagctgtaattctaaattatgtacattgccttagcaataaaaataatataatgaagcgttttaataaaagaggaaacaaaataataataataataataattattattattattattattatttgagccagggtctcactgtgtcacccaggctggagtacagtggtgcaatcttggctcaccgcaacctccacctcccaggttcaagcaattctcctgcctcagcctcccaagcagctgggattacaggcacttaccatcaaacccagctaatttttgtatttttagtagagaacgggtttcaccatgttggccaggcaggtctcgaactcctgacctcaagtgatccacccacctcattatcccaaagtgttgggattacaggcgtgagccaccgcacccggccacaaaattactttaaaaactcttcttgggaggtctatactcctgctttgatatattcatgctgctttgatctctgagtttggaatctgttggggctgcctgtgtgtttatgtgacagttctccctccatgcttcacgcacagttacttgctggccatacactgtcagatggctttagaatttggtgcacaggcaaacctgggtttgaatcccaaatctacaactactagttaagtggccctgaggttgtgactttacctccaagcctctcgtctgcaaaacgtagctaagaaagagcacatattttacagtttcatgctgattcagtgagatgacccttcagacctgccggcacatggtaagtcctgaataaagctacctgtgaagagaagtgggaaggatgatgatggtggtagtggtggtggtggtcgtggtggatgtgatagtagtggtcatgatggtgatggtagtgatgggagtggagatcataatgatggtggaggtagtgatgaaggtggcagtggtggtgatggtactgacagtggttatgatggtggacatgatagtaatggtgatagtgatggtggcaaaagtggtggtgatggtgatggtggtgacagtgatggtggtgatggtgatggtggtgacagtgatggtggcaagggtgatggtagtaatcagggtgatggtggtgatggtgtcaatggtgatggtggtggtaataatggtgatggtagtgataggaatggtggcaatggtgatggtggtactaatggtgatggtggtaatggtgatagtggtgatggtgatgatgatggtcttggtggtggtgatgccagtggtagtaacggtgatggtggtgacgatgacgatagtgatggtggtgctgatagtgacggtgatgacagtggtggtgatggcagtgatggtaatagcgaagagggactgcatggttgtggtgatggtggcaaggatggtggaagtgacagtaatgctgatgctgatgatggtgatgaaagcggtcatggagatctctcatgtcccttccctggtgccaattgtaatcacaactttgcatgctaaggactgaccttttacccagtggtaatgagaattaacgagggtcctgtgaagtccccacaggaacacagtagtggcctaagaagacccatcccatggaaccccctattcccaagcaggcagctgcacatcatgcactggaatcctcttgcaagtcaaattttgctgcagatgcttctctcaccccttccattactgcctcctaaaatcacttacggaacttctactatgggccaagtgccttaagaactctgtggctattatcttattgaaagctacaaccatcttgtgatgtaggtttcttttgaaacggagtctctctctgtcacccagtggtgcgagctcagctcactgcaacctctgcctcccgggctcaagcaattctcctgcctcagcctcccgagtagctgggactacaggtgtgtaccaccacgcccggctaatttttgtatttttagtagagacggggtttcaccacgttggccaggctggtctggaactcctaacctcaggtgatccccccaccttggtctcccaaagtgctgggattacacgtgtgaggcaccgctcccggccatgatgtaggtcttataattatctcctaagtcttcagatgaggaaattgaggttcaaaacaatgatatcatttgcttaagattgtgctgctaggaaaatacaaagctaagatttggacaatgtcagcttgagtccaaagcccatgcacaaccacctcaccaagatcataaactccagtgtctaccaagatctagacatgcgacataaatacataaggccattggtgggacgtaataaggactgtggggaactggagaccaaaggctatctagagacacccacacccactttttccttaaatacagaaccaggagaccaaccactttcaatctctgcagtagacaatactacttcactgaaatcaatttctgttgcgggaatcttgtgtcccattggtggagttatacttgattactttctggatacctttcctctttcaaaatttgtcttctttttagagtcatgttgctccacccttcaaaaagtccactctaaaatataactggaaaattctcaatgaaaagaacccctgtccaggtaagggcatttctttgctgaggcctgatttgaaacaagtttaactaaagtgagtattttgaaaggaaaaaggtggtaagatttttcacaacagccgaggcctctagagatgctgatttgtaggggactttcggccataaccaattgtgagaaaagaatttcacatcagagagaaagagaggcagacacagagaactgagccaaggatcacacacaaagaaactcactgtttgcagcgactgatattttataattatagttgttttcatttctgcttgttgccttgttggttgttacccactaaggtggtgccatggtggtcgttacccactaaagaggaccagcctcctcctgtggatcataaccagccggttgaaaaagttgacatgtaaatccctctgctttggtcatgaataaaggacaaaacccttccaccatgataatgatgatgactgtgaggctggcatttaaacacatgtgctgatgtgtacattatgggtgtcaggtgtatggaaaagctgttaattcaccctacagacttaggaaactcgctcatctttttagatcttgttttccttgtttttcataacacgttcgttataagctatgttcatcttagactcttcttgaatcttgatcattctagttcaccttaagcccctttccacaccattgcccccttctttgtgcgtgataaggcatcccagcaggtttcagagtatcacataacaacacacacactccttgcccaagcagaagtggaaaaatgaatgtgagatagaagccgacatagcagctttcaagaaataaagtaaccggacatgtaatgaggcctccttgaaaatgtttccagaaccagaatatttttcttagattcatgatcacaagtaaaatatttcctattttctataggaagatactacttaccctaaagatgaaaagtccttgcctctcactgagtctggtagcttttcagaactgacagaagaggaagtacgtcgctctttatcttgagctccggtttctcaaggagtcttgtgggtggacacggaggctgcgttgttgtttggggagtttgcataatgcagggtctattagttctctttccactgccgtaatttaagtggtacattatcatggtggaccatatcaaagtgcctcagaaaatgaatggggaaatggtgatggtgatcagtgggaaatggagagggataatggagagtgaagccaacttccaaggatatgggttcaacttcaaagaggtctttttaatttaattttcactaccagagttgaaggccagagtgtgggaaggagtcagcatatctttgtattgcttcatttcctattccagttgaccaacttgggaaaatgactcatccatattcttggtttttgggatggtaccattgaagagaattacactgatagacttggctgataagattttcaacggtttcattagggtggtattctgaaattgttgtctcatttgtattagaagaatcttcgtggccgggcgcggtgactcacgcctgtaatcccagccctttgggaggccgaggcgggcagatcacgaggtcaggagatcgagaccatcctggctaacgcggtgaaaccccatctctactaaaaatacaaaaaattagccgggcatggtggcgggcgcctgtagtcccagctactcaggaggctgaggcaggagaatggcgtgaacccgggaggcggcggagcttgcagtgagcggagattgcgccactgcactctaggctgggcgacagagcgagattctatctcaaaaaaaaaaaaaaaaaaaaagaagaagaatcttcgtaagatccagcatgaatatggcaaatatgccctaatttggcaagtccaaatacacatcaagcaatttacttcttgtcttgattttattacatatatgaaacgtggtcttattatccctaacgttaacaccttcatctttctgttttccatttatttttataaattcatgagtaaatgcaataaattatgcaaataataacatagatatggctggatagctgggctggtaatcacctcctccatgtaccactcaaaatgtttgctgcatcatcttttttttttttgggatggagtttcttttgctcttgtcacccaggctggagtgcaatggcacaatcttggctcactgcaacctctgcctcccgggttcaagcgattctcctgccttagcctccccagtagctgggattacaggcacacaccgccacgcccagctaatttttgtgtttttagtagagacgggatttcctccatgttggccaggctggtctcgaactcctaaccttaggtgatccgcctgcatcggcctcccaaagtgttgggattacagacgtgagccaccgcgcccagcctgctgcatcatcttttaaatgacaaatgaaagacggattaagcctgccattgtcagctgtactgaagacaaaattgtctgcatgtaaaactgaaatgcctaaacccaaaggaagtccctgaaattctgagcattctgtgtgctcatagtccaattctgcacgcgatagattgcaccatgggatggaagaattctctatctttaagtgtagtctctggctctaatcttggccatgtgactggctttggccaatgaaacaacagctaacaggatgcaaaaaaaaaatgctagcctgctggagtgtaagaggccatgttgaagaaaccaaggcttgatagacaataattcatcactttggttgccaatctgccgatcaccacatgtgtgggtaaggccgtgtcagatcatctattcaaccagcatacccaccaactgataaacacgtatgaatggaacaaacaagccagctcagatctgaagaatgaccacagaatcatgaattaaatgaaatagttgttattttaagaaaaaaaaaattcaatggggagaggatggtttgttatacacccaaggccaactgagacacttcccaaggtgtcctggaataggttatttgcactcttgttgtcagacatggtattatttaactctacctcccaaccacagctgattggaacatggattggtccatatggcaaacaacaacttatgagatggccaagaagataagtgtaccttcaaacagttctgtatattgaatattgactgaccaatccattcagactgtgtctctcttgagggatctgaataagtcccagaaagggatacagacagcagcgtgactcatgagctgcaatgaacaaattaagaaacaacaaaagcagaagccgttggataggagaatctgttgatgaccttcctctccaatctctacgttgggtatctcaccttgcctcggtagagcagtacagtacactgtcaccgtcagagaaaccagcccatttcaaaacccaaggagcaaatgttcggtctaggaacgtttgatatggcctggtcatttcccaaactttaacaagcatttaacaattcactttgggcaattgtgagaaacacctgttctccatccttctgcaaccggccctgtgcattaagaggtttccctgtatgttctggatcatgaggcacttgtgtactctgctgtgaagctggatttgaccagggttagccccggaagaagaaaagacagctgatgcagctagagatggggtgtttacttctctagcttcctcttccctgccagcattgcacatttggacagaggttgggtttttctgctgtaggctaaagccctttccaggttcttataaatgctccctgccttcatgccttcaagccaacgagtggttggcttcccacattgctaatcccagggtgccattagcaatggcacccacaatcccattggattacccacattgctaatcccagggtgcctcaccatcctctgttgatttcccttagccctaccctcacctaaataaacagtcctttcattaaaccctcctcatttaactcatttgagtgggcagctgtttctccccatgtcaccaattaatacacactttggtcctgattctgcttattctagctttcttatcaactgtcatagaagaggaaacccttatttcaagaaaagaagaaaacaccattctttgaccaacatgtggaactgaaccacaaaacacaaatatcacttcctcctttgccaatcatttaagaggaattgtttctcagcaaacttcccatgccttgaaatagtggtgttcagtatgtgaattggctggaaatatggcgtaggtggtccacttggaaagaatgggatataggaatcagagcttagaacctgggctctgtcagaatggcagcccagacttgatgcctaaaaggtcatgttcagtggctcgtacgtatgatctttcttgccagttcactggacaccaatggaattatgcccttagataatattgtcacctttgtttctaacaaacctcttatgctaagtgtgcttggtgcctgagatggtattaaaacatgtccccacactttctgacattcttttctggagagctgaagtctatgtcttatctccttgtatctgggctttgtaacttcttaactaatagaactgacaatagaaaataactctatgcatcttacaggaccagatcttatcttaagacagtagtagcttctttttttttttttttttttttttttttgagacggagtcttgctctgtcgcccaggctggagtgcagtggcatgatcttggctcactgcaacctccccctctcgggttcaagcgattctccgcttcagccttccaagcagctgggactacaggcgcttgccaccacccccggctaatttttgtatttttagtagagatggggtttcaccatgttggccaggctgtctcaaactcctgacctcatgatccacccgcctcagcctcccaaagtgctgggattacaggagtgagccaccgcatccagcccatgacgttatttataaaaccaagagtgcacatgtaccctagaacttaaagtataaaaaaaaaaccaagagtgatataaaaaaaaaaaccaagagtgtctcttcaggagacagaatgtcagaataacattctgttgctgtgcagtagattgacacacggtctttcccagatgtattcattcaacaaacattataaacccaatcagtgaccccaatctcctgctaggtaatacactttcagagataaatcagacaaggaacttgtctgattatgatctaacatgatgagtattacacataaaagatcaataataactttggacacaatgaaacaaaaacgttaagtcaggaggtaaccagatgactttgaactgatgatggaaagcttttctatgagcaaaaattaaataaacttcaaattagctgggcacgggggctcatgcttgtagtcccagcactttgggacgctgaggcaggtaagatcacttgaggtcaggagtttgagaccagcctggccaacgtggtgaaaccccatctactaaaaatacaaaaattagccatgcatggtggtgggcacctgtaatcccagctactcaggaggctgaggtgggagaatggcttgaacccacaagacagaggctgcagtgagctgagatcatgccactgccctccagcctgggcgacagaacgcgacttgttctcaaaaaggaaaaaagaaaccctgtccctgttaataactcaaaaaatagctgggcatggtggcaggtgcctgtaattccagctacttgggaggttgaggcaggagaattgcttgaacctgggaggcgaggttgcagtgagctgagattgcgccactgcactccagcctgggcgacagagtgaaactgtgtctcaataaaataaaataaaataaacttgaaattactaattactatatttattttagagatagagacggggtcttgctctgttgcccaggctagagtgaagtggcatgatcaagactcactgtagccttgacatcctgggctcaagcaatcctcccacctcagcctcccaagtagctgagatcacaggtgtccaccaccatacctggctactttttggtggaggggagtagagacagagtcttgctatgttccctgggctggttgtgaactcctgggctcaagcaatcttccctctttggactcccaaagtgctgggattataggtatcagccactgtgcctggtcaaattactacatttctaatgatgtatttttacaatttgggaaagtttgggcaacttctgtgtagtcataaatgtttttctttttcttttcttttctttttttttaaattgagacagagtctcgctctgttgccaggctggagtgcagtggcatgatctcagctcactgcaacctctgcctcctgggttcaagtgattctcctgcctcagcctcctgagtagctgggactacaggcgcacaccaccactcccagctaatttttgtatttttggtagagacagggtttcaccacgttggccaggatggtctctacttcttgactttgtgctcctcctgcctcggcctcccaaagttgctgggattacaggcgtgagccaacgcgcccggctcataaatgtttttcttcaatcagacaataaaagagacatataaatttcctcccactgataacaccctactgattttaaaagcactcaaatagtagagtgttaagattatagcttgaaaatgtttttaaggctgaaataacatcgttaatggaccaggcacggtggctcacacctgtattcccagcactttgggagaccaaggtgggcggatcacctgaggtcaggagttcaagaccagcctggtcaacatggtgaaaccctgtctttactaaaaatacaaaaattagttgggcatggtggcgcatacctgtagtcccaggtacttgggaggctgaggcaggagaattgcttgaacctgggaggcggagattgcagtgagccgagatcttgccactgcactccagcctgggtgtcagagtgagactccatctcaaaaaaaaaaaaaaaaaatatatatatatatacatatatatatagaaatacagaaatatatttaaatataaatatatattacatttagttaatggttcattttcttcccagaagttgattttaaaaatattgatgaatttgcttccattaaaaccaggaaagagctgggcatggtggtgtgcacctgtattctcagctactcaggaggctgaggtgggagaatggtttgagcccaggaggtcaaggctgcagtaagcccagatcgcacaactgcactctagcctgggagacagagcaaaaacgtgactccaaaaataataaaaaataaatcttacaaaaatttaaaaacaaacaggaaattagagttttaataattttggtttggggatacataaaacatttatacaatgctttaaattctaatacactttccaatttttcagtattttttcaactaatgctctgggaggataagcgtgttgtacgtggtcaataaatatttgagtaaatggatctgtattttcttgcataccataaattattcggattataagagggtaaatttatttcatgttatatgtgtgggattacagagccacgcagtttttactgcgtctcctttctccccctagtggagacaaatgataccacagggataacagaacggcaagtgcagtttgatgatagtaagaaaaatccctgttgtggaggtcacagctttacctacttaccttaaacacaggagttttctggccaggcgcggtggctcacgcctgtaatcccaacactttaggagaccgaggcgggtggatcacctgaggtcgagagtttgaggccagcctgaccaaaatggagaatctccgtctctactaaaaatacagaattagccaggcatggtggcgcatgcccgtaatcccagctacctgggaggctgaagcaggagaatcgcttgaacccgggaggcaaaggttgcagtgagccaagatcgtgccactgcactctagcctgaatgacagaaccagactctgtcaaaaaaaaaaaaaaggaaacagagttggctaaggcgactatatcttatttatttatttattgacctttttccagtacaagtttaatattcattagaggagtttttttcatgtgatgggggagaatggcggcaagtagtaggatctgctgaaggcaggagcttcactgtgatgatggcgccccacacctcgggtttcctgcagcccaggatctgatagccggccatggtatcatcacatattttttcaacaacgatgggacatggtctgcctcatctcccggggacaccaggagcgctttccagactccgggtgatcggggagcagctcccagtatggccttagttagcgtctcctcctggcccatgttaatccataggcgccccatgatgagggctagtgagggcctctccctggagtcaacggccagaattgtgtttatgaggcattctcgttctatggaaacaaggaatgggatcgcctgtcaccattcacacagtattagtgtcgtcctcagccccacaaaagtctgcccaacagatggcagtcctcggccaccatggtgtagacagtggctcccaggctccacacgcccaccagggtacatcgtacttttgtcccggggaacagttctgaggctgtataagaggagctcccaccgaaggggatcagctttcagcctacggtgaatctggtatcaaagccagcgtctgttgtttccatgtcgtgctgagcctcctcagggaagttctctgacttcagatccctgtggataatttccttctggaagcctcactgcatggaatatcctatttgctggaacttgcctcaggcctcttcccccttcaagaagaattcgagggtgaagtcggatagctctcccgagctggcttaatccatgactaggaacagcctgttctcggtgccagccacgtgggtctgatgatcttcgggtgattaagggccttcatcatatggtccctgcagtacagaccctgggggctgcaggagccctgctgccctgttggggtgacctccacagccatcttggtcccagtgagaatgtgctgggccagctgccttgacttctgcaaagctgccctggctgatgaccttgaggagcctatgatcatcagtaagggactcctcggaggcagaagtggttccaaggccctgcagcgtggtgacctcccggctacacatctcagctaggaatgccaactgagaatactacccctacaaactttgctaaccaggaacacgaatgacacggctggaggtgtctgctgacatgtgagggtggcctctggtcacctccatgccagggacaacgttcgaggccaactctaccatggctgcacccaggaaccggatgatgtcatcaggaatcatctctcccggcctcttggccctgctgacttccctctgagttgatgtcattctcaggtgggctcttcctccaacgtggcaagatggcacccacagctccagcagcctaacggaaatagatcttctccgcccagatgtttccaagacaatgacctgacctttggcactgagtgtgtcacatgagcaggccttagccaatcactgtggacaaagaagatgggatcagcccattggccaggttgaggtcatgtggccactgtctctatggaaacttgggagatgcttaactgttttcagttgggagactctgtggtggctgagagagcaggttcaggctcgaaaggtcactacaactggatatgcaactgcagaagaatgactttggacgcctacctcacaggatatataaaaaatgaatgaaacaacagctaacaaggggccagaaagtgctagtctcctggagtgtatgatacacaaaaatcagatcaaaatcgatcagtgttataaatggaaacgttgaaactagaaagctattagaagcaaacaaagggtaattttttataaccccatctaaggtcatgaaaacccatagtgattttagagatgacaccaaattacaagcaaaaaaacaaaaagtagatacatttcagttcactattttgtacactctatgagttttaacaaatgtgtaataacctgtacccatcattatgtgtcatacagaatggtttcgctgccctgaaaatcccctgtactccacggccttagaggtctggcggtgtgagcctcgtcattgatgttttgggtggtggggaatgtaggtgtttttcagttactatcctccgctttagggcagaaaagagaggaattccccacctagccccaggttttcataaaaccataagtaatgaaggaacccaatactgcaggtgaagaaatgaatcgtcaggatatattgatccgtgggattatcatagtaaaaatagctaagaaataaggaaggagatcacattttagaacccaacaatgcagcttgaattctgcatggatcttgagctactcatttggactttgtgaattcagtgtgaatgttgcttcccaggcaatgggggacgcatgcacttgccggtgctcgtgcacacgggattggcgtgcagatgtgtgcgggccgcacaggggatgttctgcagctgccctgggccctgggtgtgtgaggctgcccccctgccatgttgaactttaaagggtgtgatgccggaatgttgttggctgagtccggactggcatgagcccttctgatcctgttacctcacaccttgcctggcatcatcccaaaaggcgtttgtgcaaatggcttattgacacgggcttgggaccaaatccacccaaggggagggggtccctggggccttgctatctgtggacttggatgaaatcatagtgcctgggggtggagaggatgaccctcagatatgttttccaactcgtgtttttcttctagatgcaggaccccagatgcagagccccagggcatagaggattccagattcttgcaggggactggaggaggctcggctgaaaggagtcagggctgcgagggtaggggacagattcgagtagtttctccatttcacagcaataattactgccccccaccacacacacacacacacacacacacacacatgcacacacatgatatatgcatacacctgtctgtgctgcaagttccccttttgctcagacttagggttttgcagacacttctaaggaaacaaagatgttcccttttatttttgtctacttgctcctgaagcttcccctccatgtgtgcaatatgactgatgccaactgctttctttctttcttttttcttttcttctctctctctctctctttttttttttgagacggaatttcactcttgttgcccaggctggagtgcagtggtgtggtctcggctcactgccacctctgcctcccgggttcaagcgattctcctgcctcagcctcctgagtagctgggattacaggtgcccaccaccacaccaggctaatttttgtatttttagtagagacagggtttcaccatgttggccaagctggtctcgaactcgtgacctcaggtgatcaacccgcttcggcctcccaaagtgctgggattacaggcatgcgccactgcgtccagcctattttttacattttaaatcaggcaattataatatatcaaacatctatattccaatcacccagaatggagaattactgaatttggttatattcactttgagtcttttaaaaataacattttacaaacaagtagtctcccgttggctccccagacaatccaatttctcttctccctgtttcccagagcaggcaaatatcattatttattcggtgtatatacttctattctgaatttcatacacatacattatatacatccaaatacatattaataacatttaagcatgtattaatatacaaaacacatatatccgttaacattacctaggattgtttagtgcatttacatttttacatatatacaaaatacgtatacttattatgtttgattctattttttggttaacttgttctttaaagatgaatctagctgggcccgaggcaggcagatcacctgaagtcaggagttcgagaccagtctggccaacatggtgaaaccctgtctctactaaaaatacaaaattagccgggtatggtggtgggcgcctgtaatctcagctactcgggaggctgaggcaggagaattgcttgaacccaggaggcagaggttgcagagagccaagatgtgccactgcactccagcctgggagacagagcaaaaccatgttaaaaaaaaaaaaaaaaagaatcctctggtcttgggaatctaatgccctatattataattcatagccagacacagagtaattacttgtttgcacccagcgttctaaccacaggaagggaatgggggaagtgggtttttgcaagaacctgctttgaggtgcacacctccacagagctaagcaatctagtctgggagataatactcatacgtgtccaggaaatgaggaacaaccagatagcacataattaaaacaccatattttatgatgcagatcatttaagaaatgtgggaggctggatgcagtggctcatgcctgtaatcccagcactttgggaggctgaggcgagtggatcaagaggtcaggagttcaagaccagcctggccaacatggtgaaaccccgcctctactaaaaatataaaaattagccaggcgtggtggcgggcacccgcaatcccagctactctggaggctgaggcaggggaatcacttgaacccgggaggcagaggttgctgtgagccgagatcatgccactgcactccagcctgggcaacaagagtgaaattccatcacacaaaaagaaagaaaaggaaaaaagaaaagaaaagaacaggaaagaaagaaagatgggatgagtcacactgcacacttgcagaagtttcaggagcaagatgacaaaaattaaagggaacatctttgtttccttagaagtgtctgcaaaaccctaagtctgagcaaagggggaacttgcagcaccagacaggtgtatgcatatatcatgtgtgaatatgtgtatgtgtgtgtggtggggggcggtaattattgctgtgaaatggagaaactactcaaatctctcccccaccctcgcagccctgactcctttcagccgagcctcctccagtcccctgtaagaatctgaaatcctctatgccctggggctctgcatctggggtcctgcatctagaagaaaaacacgagttggaaaacatatctgagggtcatcctctccacccccaggcactatgatttcatccaagtccacagatagcaaggccccagggaccccctccccttgggtggatttggtcccaagcccgtgtcaataagccatttgcacaaacgccttttgggatgatgccaggcaaggtgtgaggtaacaggatcagaagggctcatgccagtccggactcagccaacaacattccggcatcacaccctttaaagttcaacatggcaggggggcagcctcacacacccagggcccagggcagctgcagaacatcccctgtgcggcccgcacacatctgcacgccaatcccgtgtgcacgagcaccggcaagtgcatgcgtcccccattgcctgggaagcaacattcacactgaattcacaaagtccaaatgagtagctcaagatccatgcagaattcaagctgcattgttgggttctaaaatgtgatctccttccttatttcttagctatttttactatgataatcccacggatcaatatatcctgacgattcatttcttcacctgcagtattgggttccttcattacttatggttttatgaaaacctggggctaggtggggaattcctctcttttctgccctaaagcggaggatagtaactgaaaaacacctacattccccaccacccaaaacatcaatgacgaggctcacaccgccagacctctatctaaagccgtgaagtacaggggattttcagggcagtgaaaccattctgtatgacacagtaatgatgggtacaggttattacacatttgttaaaactcatagagtgtacaaaataaagagtgaactgaaatgtatctgctttttttcttgtacttttggtgtcatctctaaaatcactatgggtttttatgacctaagatatggatcataaaaaattaccctttgtttgcttctaaaagctttctagtttcaaggtttatgtttacgacactgatcgattttgagttgatttttgtgtatcataacgtgcattagactagcactttctggccccttgttaactgttgttttcattcatttttctatatcctgtgaggtaggtgtccaaagtcattctgcagttggatatccagttgtagtgaccttccgagtctgaacctgctctctcagccatcacagcgtctcccaactgagaacagctgagcagctcccaactttccatggagacagtggccacatgacctcaacatggccaatccgcagatcccatcctctttgtccacagtgattggctaaggcctgctcatgtgacacactcagtgccaaaggtcaggttgttgtcttggaaacatccgggagaagatctatttcagttaggctgctggggctgtgggtgccatcttgtcaccttggaggaagagcccacctgagaacgacatcaactcagagggaagtcagcagagccaagaggccgggagaggtgattcccggtgacatcatctggctcctgggtgcagccatggtagagttggcctcgaacgttgtccctggcatggaggtgaccagaggtcaccctcacatgtcagcagacacctccagctgtgtcattcttgcttcttgttggcaaagtttgtaggggtagtattctcagttggcattcctagctgagatgtgtagctgggaggtcaccacgccgcagggccttgggaccagttctgcctccgaggagtcccttactgatgatcataggctcctcaaggtcatcagccagggcagctttgcagaagtcaaggcagctggcccagcacattctcactgggaccaagatggctgtggaggtcaccccaacagggcagcagggctcctgcagcccccaggatctgtactgcagggtccatatgatgaaggcccttaatcacccgaagatcatcagacccacgtggctggcaccgagaacaggctgttcctagtcatggattaagccagctcgggagagctatccgacttcaccctccaattctccttgaagggggaagaggcctgaggcaagttccagcaaataggatattccatgcagtgaggcttccagaaggaaattatccacagggatctgaagccagagaacttccctgaggaggctcagcacgacatggaaacaacagactctggctttgataccagattcaccgtaggctgaaagctgatccccttcggtgggagctcctcttacgcagcctcggaactgttcccggaggcaaaagtacgatggactccggtgggcgtgtggagcctgggagtcactgtctacaccatggtggccgaggactgccatctgttgggcagacttttgtggggctgaggaggacactaatactctgtgaacgatgacaggagatcccgtttctcatttccatagaactagaacgcctcataaacacaattctggcccttgactccagggagaggccctcactagaccacatcatggggcgcccatgcgttaacatgggtcaggaggagacataaataaggccatactgggagctgctccccgatcacccggcgtctggaaagctctcgtggtgtccccgggagatgaggccaaccacgtcccatccttgtaggaacaaaaatgtaggaacaaaaatttttagtagagacggggtttctccattttggtcagggtggtctcgaactcctgaccacaggtgatccactcgcctcggcctcccaaagtgctgggattacaggcgtgaaccactgcgcccggcccacaacatggatttttcttactataaacatcaagctacacttgccacagtcttttaccgctgtggtctcatttgtctccaccagagggagaaaggagactcaataaaaactgcatggttctcggccgggcatggtgcctcacgcctgtaatcccagcactttgggaggccgaggcgggtggatcactgacgtcaggagttcgagaccagaccagcctggccaacatggtgaaaccctgtctctacaactactactactaataataataatacaaaaattagctggacgtggtggtgtgcacctgtgatcccagctactcgggaggctgaggcaggagaatcacttgaacccgggaggcaaaggttacagtgatccgaaatcacaccattacactccagccttgggcaacactccatctcaaaaagaaagaaagaaaaaaacctgcatggttctctattcccataaatatactgcaaaataactttgccctcttataatctgagtgatttatgatgtccaaaaaaatagattctttcactcaagaagtatttattgaccaccgacaacatgccgtttccccagaacattaaggcagttcaaaaaatattgaaaaatggaaaagtaagcatattggaacataaaacattgtttaaatatttatccccaaactattaaaaattttaatttcctgctctcaaatgtttgtaaaaacttttttattttttcatatttttggagtcaaggtcttgctctgtcacccagactggagtgtagtggtacgattacagctcactgcagcctcgacctcctgggctcaagcgatcctcccacctcagcctctggagtagctgggatgccagccaatccacatactgaataccactctttcagggcatgggaagtttgctgagaaacaattccttttacatgactgacaaaggaggaaatgatgtttgtgttttgtgcttcagttccacatgttggtcaaagaatagataatctaagatagtgttactcactcatcttgtggttggaagttggcaaccagagtgatgaattgttgactgccaagccttgtttctctcccacgtggcctcttacactccagcaggtcagcactttttgacatccagttaattgttgtttcattaagttttgtataccacatgaggtaggggtctaacttcattctttttcatttggatatccagttgtaaaagcaccatttgttaaaaatactgatttttcactttgggaggctgaggctggtggatcacttgagatcaggagtccaagaccagcctggtcaacatggtgaaaccccttctgtactaaaaatacaaaaattagccaggcatggtggcatgcccctgtaatcccagctactcaggaggctaaggcacatgaatcgcttgaacccaagaggcggaggctgcagtgagccgagactgcgccactgctctccagcctgggtgacagagtgagactgtcttttccccattgaatggtctttgtgcacttgtcaaaaaccagttagctatggatatgggtttatttctggactctcaattctaccccattgttccatgaccctatccttatttcaatatcacacctgtgattacagaatttttgtattaagtttggtaattggaaaacatgggttttccaactttgtttttctttgacaagattgtttcaaaccttgaaattctacatattaataaattataggatagtttctccatttctgcaaaaagggccactgggattttgataaggatttcattgaatctatacattgctttggattgtgttgtaatcttaattattctaagtcctctgatccatgaatatgggatgtctttccatatatttaagctttcttcattactttcagcaatgttttctagtttttagcacaaatctctcaccttttaagttaaattcatacctaggtgctctactcttttggctgttactataaataaaattatttccttaattttctctttggagaattcgtttgaagtatatagaaacacaactgagttttgcatattgatcttgtaccctggagccttaaaaatttgctctaatcattttttgtggattctttgagattgcttgtgtattggatcttgtcatctgggaatcaggataattttacttcttcctttccaatttgaatgccttttatttgcttttcttgcctaatttttctagctaaaactttcagaacaatgtttaataacgaagtgaaaatgggctccttgtcttcgtactggacttagaggtgaagcagccagtcttttgctatcaattatgatgttagctgtggtttctgatttatgtcctctatcatgttaaggaagttccctcttattatttctgaatgtgtttttattaaaaagtattggatttgatcaaatgaacagctgcatttttttaaagcatgattttttcttccttttatttttattttatttatttatttatctttgagacagagtctcgctctgtcaccaggctggagtgcagtgcagtggcatgatctcagctcactgcaacctctgcctcccagattgaagcaattctcctgcctcagcctcccgaatagctgggactacaggcgagtgccaccacgcccagccaatttttgtacttttagtagacacggggtttcaccatgttggccggaattgtctcgatctcttgacctcatgatctgcctgcctcggcctcctaaagtgctgggattacaggcgtgagccacccaccgccttcttccttttattaatgtggtagattacattgattgatttaactaaattgaatgtcctttgctttcctggggtattttccatttggacatggtatgtaatttttcaaatacgctattagatttgatttgctagtattttattggagatttttaatctgttatcttaaaggtattggtctatagttttcttgttatgtctttgtctggtgtgttaccagtgaaatgctggcctcatagaataagttacaatgtgttccctccttttctattttttgggggattttaaaggtttgatcagattcactagtgaggccatctaattgtgagcttttctttgtaggactgtttttattactaattcagccttttttcatattatagatctattcaaactttgtattttttcttgaatttgctttgttttttatttttgtttttgttttgagacaaggtctcactctgtggcccaggctggagtgcagtagcgagatcttggctcactgcaacctctgcccccttggttcaagcaattcttgtgcctcagccaccgagtagctggggttacaggtgtgcaccaccacgcctggctattttttgtatttttagtagagatggggtttcaccatgttgccaggctggtctcaaactactggcctcatgtgatccgcccacctcagcctaccaaagtgctgggattacagtcatgagccatcacacccggccttcttggatctgttttaataatttgtgcattttaaggaatttgctcatctacattacagaatttattcatgtatacttcattatattctccttttttatttctgcaaggtcagtaataatgtctccatgttcatctctaatttatttatttgcatttgccctctgtcatcgaggacagactacctaaaggtttgtcagtttgccaatcttgaagaaccaacttgtggtgtcactgattttctctgtgctttttatattctctatttcatgtacattcattctaatctttatttctttctgtctgcccacttttaatttactttgctattctttttgtagttccttgagattaaaagttagattattaatttgataccttttttcttttttgaagaaacttgttaaaggtttaaatttgcgagcaatgtttctacagaatctcacagacattgatatgttgtgtttccaatttcatttctctcaagatattttctaatttcacttgtgcattcttttttgttttgtttcgttttgtttgagatggagtctcactctgttgcccaggctgtggagtgcagtggcgcaatcttggctcactgcaacctctacctcctgggtttatgcgattctcctgcctcagcccacccctgccccaagtagctgggattataggcgcacgccaccacgcccggctaatttttgtacttttaatagagacggggtttcaccatgttggccaggctggtcttgaactcctgacctcaggtgatccacccgcctcggcctcccaaagtgctggaattacaggcgtgagccactgcgcccagccgtgcattcttctttaaaccattggttgtttatgagcctgctatttaatttccacatatctgaatttcccagcattctttttattgtgaatttctagcttctttctagagcaatcttggaagatactttgtatagtttcagttttttttaatttgctgtgacctgtcccatggcctaacatatggtctatcctggagaatgctccattgcacttgagaggggcgactgctccgctgttggtaaatgcagtgctctacgtaggctttgcgtccaagttggtctatagtttattcaaatcccccctttcatgattaatgcgctgtctgttgggtctatgcattattgcaagggccatattgatgtctccagcttttgtaaaaccatctattttccgccttaaattttgttcatctttacttcttatatttctggtctccatggtttcgtgagtacattgtcatagttttgtttcttcttactgaattgacacttttatcagcatctacagttgaaccttgaacatcttgggggtccgggcactgaccccacaccaccagcagttgaaaatccgcatataggccgggcacggtggctcacgcctgtaatcccagcactttgggaggccgaagtgggcagatcacctgaggtgaagagttcgagaccagactggctaacatggcaaaacactgtctctattaaaaatacaaaaattggccaggcgtggtggtgggcacttgtagtcccagctacttgggaggctgaggcagaagaatcgcttgaacccaggaggcggaggttgaagtgagctgagatcgtgccattgcactccagcctggtgacagagcaagactctctctctcaaaaaataaataaataaatacataataaaataaagttaaaaaaaggaaaaatgtaactacaaaacactaaatgatccttcagcatagaataatttaattacttcttgtttgaaacattatcttttgtaaaaacaaaaaaaaaattaccttttgtatacaatgttcaccatttgggtaacgagtaccctagaaacccaatccgtaccattcagcaaaatatattaataaaatcaacaaatacatgtacccctgaatctaaaaaataaaaatgaaaatgtaatttcaaaataaaaatttaatgttaaaatcagtgtactttattaaattatgtaatgtaatcatatcacttaaaaagtatataatttaattttattttttagaatttcatttaagattaaattagaatttagtaggaaaactaattaacatcaggccaggcacagtgactcacacctgcaatcccagcactttgggaggccaaagcaggcggatcacctgaggtcgggagtttgagaccagcctgaccaacatggtgaaacccgcatctctaccaaaaatacaaaattagccaggtgtggtggtgggcgcctgtaatcccagctactcaggaggctgaggcaggagaatcgcttgaacccgggaggcaggggttgcggtgagccaagatcgcgccattgcactccagcccgggcaacaagagggaaactctgtctcaaaaaaaacaagaaaagaaaagaaaagaaaagaaaaactaataaaaatcatggtaaacggacattgaggtgtacaatgacatataaaggtctccttctttgccttacgaaacccaatttctcgccacaaaaccatccactccttacactgttgcctttcaaatgcttttaataaagaactggtggggaagtacaaagtgtgacaattcatagcaggaaagaggacgggcattaaaagatagggattcaaaacccaggactgtccccactgactcaccccccaactgcggggccacaccccacagcttctcagcaccccctcctcctgcacttcatccacctgtcacatttctgcccgcctggccagcctgtctgcctgcaaggccttggccagtctctccctggctttcttcaccctcctggcctgtctccggatatctgcaggagtcaccaattggccagagaggggcggtgggagctgacaacccattcctggggttggcccccctgccacagctggaaaccgcccaggggtgggctcaagcgggctgcgcacacgctcagcaccagctctgtccagagattcaccggccgtccccggtgcaaggatacttaagacgctctccaaatgcagtggacttgaaccttctccttggctgctgcagggctgcagggcctgcagtctccggtaggcgcagagttgctgcggcttctccaggtgctcgtccccttttctgcgtctgacctggttgtcaggatgagacctgatccttgtcaccggcctccggaagatgcagctggtgagtctcatggggagagcagacctcgcagctcgtctccgatgggccttggccatgtggatttctcgtttcttctgtaaagcccagggcatcatgttccttttgagcttcccctttcaaaagaaaagaaaatgtgaaatttcaaccaaatggagacaggagaagatcagctgtggggggcttctctcagctcagtggaatcttcccaccagcctctctttctggggaaatgtgtctcaaatggcagtgtacatcctcagcacctgcagggtttgctgaagtcagatatgtggacctgaacccaagtaagtctggggtggaacctagagtctgcatttctccgtgtgaccctgatgctgctggcaggagctccaggcattgacactgggtcctgggacctcatcgggctgatgcgagtcaaggactaaatgctcaaggtcatgacccagggtcagttccagaccttgtccctcctcatcctcctcagaggacacccctctcttctcttccctgccactgtcagctacacagatgctggtgcctcctaacccatccccaacaggacaccgggatcccagacttccctgttcaccaagacctcacgcttctctgtatctctttctgctgtgcttcaggacacaacgtcattttcatagctccttgactctctggtttccaaagaaatcgtgcactcgccaccttaaatactcactgccacacccagatcccaccttcacctgaacacctcctgctcatgaagaaaaacctcagaaacaccatgttgctttctgtttctaataagctcaattaactagagttacaccatgagagaatcttttgatgacatactgagaaagatgattaagcccctcctaagatttgaaatcctttcttgctctaaatcaattggaagactctagtctcataaagctgtttcagatacaaacataaagccttcatttctgtccttctcatttcatttctgttgtcctggcattaagattaatactaccccttacacgacccaaggtgttcccctttggagggaaaattatttagtctccttagttacagggcacttatgatgtgccaagctgtgcagtagaacccctgatccagaagtaaactgcagaaatcaccactctgttgattttcatcttggtgagaaggaagacataataaacacactaaaaacaaatttccgatagggtatcagatataattaagttccatgatgaagaagaagggagagacagagagggatggaaggaggagaaacagagaaacagaaaagaaagaaattcactacaatgaatcatgacagtgagtttagggaaggactaaccaatcatgatatttaaccagagaactaaaatttttttttaaagggaccaagcaatttctggttcaagaactttccagagagagagacaatttgaagactgcaaggccaagtaatacctcttttccttcttagtgatgttgttggacttttaaaaaatcagggctattatccccagatagctccgtgaacaaaaaattagaatattgttgaatattttgaatattacttgagtattactcaacaaatattaacacctagggtataagtttccacgagatagcatctagttttgagaacaacttgctaaactgtgaagatgttttacagaaagaaaaaggaatacaaatggacattattttggtcaatagtcaataaggatcccatactcaccagaacaggcaggcttggaaaagaggtgaacgcaggttctcccatagctgtagagttcctcctgctgaccccactcctgaggcacagacagcccttggcttgccggaaaatgcagtggcttctgcatctagctcctcttttatagagggagtgataatgcaatcagtggataatccatagggaacgccctgtctccacccattggatttgaagcatttctaaatctttatacagaaaccaatatggtgttaccaacacagaatgtcagtagaaaaagaatttaatccgtgtgtgtggcggggtggtatttacagttaatatcggcattttagatatgtttccttttcctcccattctctcaaacatctttgaaagcattctacggaaataagaatggaattgtcggccgggtgcggtggctcaatcctgtaatcccagcactttgagaggccgagtcgggcggatcacctgaggtcaggagttcgagaccagcctcaacatggagaaaccccgtctctactaaaaatacaaaattaactgggcatgatggtgcatgcctgtaatcccagctacccgggaggctgaggcaggagaatggtgtgaacttgggaggcaaaggttgcagtgagccgagatagtgccactacactccagcctgggcgacagagtgagactccatctcaaaaaaaaaaaaaaaaaaaaaaaaaaaaagagagaagaaacaaaaagaaaaacacctaataaataaacagacctaataaaaaagaaatacagtctcagcagccttggtctatgcagtgactactcagttttttcctattatttttcatgatgttttcattgtataaatcttcctggtttgatctttgaggaggcagacagatgctggctattttaccaatttggacctggggctaggaagtttaagacacaattagcttacgtatttaatcacattgtggcaatttcaatgcaccgatgcctcccctgcaaactccaatatatagacacaatataccgcgctctagcctgggcgacagagtgagactccatctaaaaaaaaaaaaagaaagatctcctattaatgaaaatgcagagagaaatgggtgttagaaaatcatattggaaaagatatttgcatgatgtgcatccagtaaagtacatcaagccagaatacagactagaaagatgtccatcaaatgaaaaaaaatactaaaaattgatgtgcaaaatgagtggaaaacttcagtaggcactattgaagagagaataaataaatggtcaatacaatcctgaacacatgcccaaattctgtttagcttcagataaacgctgatgaaaaatcactatgagatactcatatacacttctgtttggctaaaatgaaaaaatagcaatgccaagtgcagacatggctatggagcaatcataccattcacgtgtagccagtgagagtttaaatgggaagaaatgtactttatttgtatcccaacctgaacgtacattggaatctcctggagagtttgaaaaactaatggtagcacacacccctacacatttttattccactgatgttggatgcagcctaggctataggaattttacaatcccctaaagaccaaaaggacaggcaaggatgacacaccacttccctggttggtttggagtctgtggttttgaactttggtttgcagaaaacacacctgggagtgttttcacacctgggtgccttccagaccagtgtctccggatgcctacgggaggggccaggaaatcagaaatcatttatttatttatttatttatttagagtctccctctgttgcccaggctggagtgcaatgacgtgatctcggctcactgcaacctccacctcccgggtttaagcaattctcctgcctcagcctcccaagtagctgggtttacaggcccaagacaccacgcccagctaatttttttttcttggagacagagtcttgctctgttgcccaggctggagtgcaatgacgtgatctcggctcactgcaacctccacctgccaggttcaagcagttctcctgcctcagccttccaagttccaagtagctgggattacaggcgcctgccaccacatccggctattttttgtattttttttagtagagacgaggtatcaccacgtcggccaggctggtctcaaactcccgacctcaggtgatccacctgcctcagcctcccaaagtgctgggatgacaggcatgagccaccacgcccagccacgcccagctaatttttgtattcttggtagagtcagggtttcatcatgttggccaggctggtcttgtcctgacctcaagtgatctgcccacctcagcctcccaaacagaatttattgttattattatttttaagaactccaagtcctgccagggcagggtggtttacacctgttatcccagcactctgggaggccgaggcggacagatcatttgaggtcaggagtttgtgaccagcctggccaacttggtgaaaccccatctctactaaaaatacaaaaattaggccgggtgtggtggctcacgcctgtaatcctagcactttaggaggccgaggtggttggatcacttgaggtcaggagtttaagaccagcctggccaacatggtgaaacctcatcgctactaaaaatacaaaaattagctgggcgtggtggcaggtgcctgtaatcccagctactcaggaggctgaggcaggataattgcttgaacccagggggcagaggttgcagtgagccaagatcgcaccagtgcactccagcctgcacgacagagcaagactctgtttcgaaaaaaaaaaaaaatacaaaagttagctaggcttggtggtgggcacctgtaataacagtgactcgagaggctgaggcaggagaattgcttgaatccgggaggcggaatttgcagtgagctgagatcgcaccactgcactccagcctgggtgacagagccagattctatctcaaaaaaaaaaaaaaaaaaaaaaaaaggaactctaagtccttcatttctaagtcaagaagaggacatttctgtcatttcgggggtctcagattttgcagctcatttgaatttcacagtaaaatttaaaaggactggtgtctggatcccaggcaggatcatttgcatccatataatggagtttgctgaggtgctgagggagacatcagtaccttgaaattgccctacaggattaaatctgtaagctaattgtgtctttttttttttttttaatttgagacggagtcttgctctgtcgcccaggctggagtgcagtggcgcgatctcagctcactgcaagctctgtctcctgggttcacgccattctcctgcctcagcctcccgagtagctgggactacaggcccccaccaccacgcccagctaattttttttgtatttttcagtagagacggggtttcacagtgttagccaggacggtctcagctcctgacctcatgatcctcctgctttggcctcccaaagtgctgggattacaggcgtgagccaccgcacccggccctaattgtgtcttaaacttcctagtcccaggtccaaattggcaaaatagccagtatttctctgcatccccaaagatcaaaccaggaggatttacacaaggaaaagattgtgaaaaatcataagaaaaaactgagtagtcactgcagagaccaaggctgcagaaattgtattttttttatctgtttatctattaggtgttgggtgtttgtttgtttgttttgagacaaattctcactctcaccccagctggagtgcagtggcgtgatctcagatcactgcaacctccacctcccaggttcaagggattcatgtacctcagcctcccaagtagctgggattacaggtgcccaccaccatgcctggctaatttttgtatttttagtagcaacagggtttcatcatgttggccaggctggtctcaaactcctggcctcaaccaattcacctgcctcggcctctcaaagtgctgcgattagaggcgcgagccactgcacccaggtgtgtgggggttttgtttgtttgattgtttgtttgttttttgagacagagtctcgctctgttgctcaggctggagtgcagcggcgctatctcggctcactgcaagctccacctcccaggttcacgccattctcctgcctcagcctcccaagtagctgggactacaggtgccccccaccatacccggctattttttgtatttttagtagagacagggtttcaccgtgttagccaggatggtcttgatctcctgacctcgtgatccacccgccttggcctcccaaagtgctgggattacaggcgtgagccactgcgcccagcctgtgttgtttttaattgtatgtatttaaggcatacatgatgttttgatgcacgtatatgtagcgaaatgattactacaatgaagcaaaggaacatatccgtctcctgatgtaattacctttgtgtacgtgtgtgtagaaagagtagctgaaatctactctttcggcaaattcccagtatacaaggcggtattcctgaggttgttttatggggtggaagtttgccacagattggccataagcgggagtttatatctcagtctcttttcctcaattgttattgccatagaacttacatagagcaaagtgcaaaaaatcagacacatacatcttcacgaactttcacaaactgaacgcactcatgcccagcactgaaatcaatgaatagaatagcggattcatccccaggtgccttttcctgctaccccatcctgcctcccacaaaggcaccctctgttgtaacagcacctaggattagtttggctggtttttgtttcacgtgtagggaaccacatggtatgcactgtcttgggtttggattaacctcagctttgagagatcaaggcttaaggttgtgccggttgtcatttgtgagttctgattgctgtgagaagatccgatgggtgcagatgccccagtatttattcattctcctgctgttcattggctggtttctgacaagagctattatgactgcaggttctgtgccccgcagaacatgaaattggtgggcacgcatgtacaatgttgagataaatgctgtgtgcaagggaagagggtagacgtttatacggcttttggggtttgtttgagacggagtctcgatctgttgcccaggctggagtgtagtggcacgatctcggctcactgcaaccctcgcctcccaggttcaagcaattctcccacctcagcctcccaactagccgggattacaggcacccaccatcaggcctagctaatttttgtatttttgtggagatggtgtttcaccatgtttgcctggctggtcttgaattcctgatctcaggtgatctgcctgcctcggcctcccaaagtgctgggattacaagcttgagccaccgcctgtttgttcttttgagacagtctctctctcacccaggctggagtgcagtggcgcaatcttgtctcaccgcaacctccacctctgggttcaagcaattctcctgcatcagcctcccgagtagctgagactacaggcgtacgccaccatgcctggctaatttttttgtattttcaatagagaggaggtttcaccatgtcggccaggctggtctcaaactcctgacctcaagtaatccgcgcgcttcagcctcctaaagtgctgggattacaggcgtaagccactgtgcccagcctacagcttttgtttttgagacagggtcttgctctgtcacccaggctggagtgcagtagctcaatcacaactcactacagccttgatctcctgggctcaagtgatcctcccacttcagcctcctaagtagatgggactacaggcaggcatcaccatgcctgacaatgcttattttttattttttgtagagataaggtcttcctatgttgtccaagttgcttctagactactgagctcaagcgatcctcccacctctgcttcccaaaatgctgggattacaggcataaaccaccatgcctggccctatacagctttaatagatgtttgcatatagttttccaaagcggttattccaatttaaactcccactatccttacgggaaagactggtccctccataatctagtcagcacttggtgtttctgcgtttttccctttagctaagttgatatctatataatagtatctcattgtaatttttatttttttagcatttccctgaagctaaaagggttaaacatttgctcaaattttgctggtcatttaggccgggcgcggtagctcatgcctgtaatctcagcaatttgggaggccaaggcgggtggatcacttgaggtcaggagttcaagaccagcctgggcaacacggtaaaaccctgtttctactcaaaatacaaaaattagctggacgtggtggtgggagcctgtaatcccacctactcaggaggctgaggcaggagaatcgcttgaacccagaaggcagagttgcggcgagccaagatcgtgccactgcactccagcctgggtgacagaacaagactccacctgaaaattaataataataataatgatgataataattttttacggtcacttgtttatattcttttgtgtaggatccattcaagtttttcacccagtttcaagtgtgttttcattatttttctctgtttgtttgacattattctcttttttttaaatattaagattttttttatatatatactctggcttgatgtactttcctgggggtacaggatccaaacctcttcccccactccggttttccacgctttctctcttactgatgtatttgaatgaatagttgctcttaatgtatcttaatatggttcaaatttgaattttctcctttctatttagagtttcattgtatcaagaaggcagattatctcctcattgactgtgaagctgttcttctacctagtttttaattaaagctatttactgtgttttatacttagaactgaaactaagagtataagaaattaggccaggcacggtggctcacgcctgtaatcctagcactttgagaggccaaggcaggtgaatcacttgaggtcagtagttcgagaccaccctggccaacatggtgaaaccccgtctcgacaaaaaatacaaaaataagctgggtgtggtggcatgtgcctgtagtcccagctacttgggaggctgaagcaggagaatcattgaacccgggaggcagaggttgcagtgagctgagatcccgccactgctctccagcctgggtgacagagtgagaccccatctcgaaagaaaagagagaaaagaaaggaagacaggaaggaaggaagacaggaaggaaggaaggaaggaaggaaggaaggaaggaaaattaaaatgagactgaacctagaaaaaaggtagattagcaaagtggaacaaggttcaagagcaaatattcccaccaaagcatgaacaacattggaaacttcagagacaagtgggatgtgattaaaagaagagtagagagaacttggacaagaatggatatcagaagtgaaggatacatatgcaccttccaaaccaatgaaagacatcaacccacagatgcaattgactccacaccctctaggcaaaggaaatacacaggaagcaataatgagctacactgtggcctacaaaccaaccacaacgagaaagagtttagagaatgtggaaagcaaagaagcaaggaaaagcctgacagctgacatctcaacacaggtaaaatgagatagacatcagtggggcaccatttctaatatgctgaaagaaatttgtcaaaccagacacccgtacctgacagcaatattgcccccaaataaagatgcctaaataaaagtgtaaaggaaaacaattagttgttagcagcattgaattagaagaaaaatactagaatgaattctcaagtccacagggaaataatcccagattgaatgctagaaatgcagaaaggaacaaagatgaatgcacaagataagctgtaggtaaatattagtgcatattgctttatgaagcaatactagaaatgtctcctggagagtaaaatatgtgtagaattaatatgcatgagaatggtaatacaaaagtcagaaacagctaaaaagagaattaaaagtgttctaaagtattagcattttgtgggaggggttaaagtaattaattgtatcagagtatatgatttaattattagcataactacacagatttgtatggctgtaactagcaagttcatggagataacaataaaataataaacatatttaattcaaagtcagtcaagtaaaggcaaaaggaacgtgagtcagttaagtcaaaacctaggaaaaatgagatgattgaaacaatttcaaatttactggtaattatattaaatgtaaatgcacgaaatagaacttttttttttttttttttttgagatggagtctcactctgtcgcccatgctgagctgcagtggtgcgatctcggctcaccgcaacctctccctcccaggttcaagcgattctcctgcctcagcctcccgagtagctgggattacaggtgcatgccaccacaccagggtaagttttgtatttttagtagaaatggggtttcaccatgttggccaggctggtctcgaactcttgacctcaggtgatctacctgccttggtctcccaaagtgctgggattataggcgtaagccacctctcccggccaaagtagtaatttctttgcaacaactgtgtgatatattctataggattgtgaataaaagttttgggctttcttttcttaaagaacatttaaatggtctttagttgttgttattaaatcaaatattacgtgaacatttatgtacatagacaattccattcctatttctatagaaagtattcaaagatgtttggaaaactgggagaaaaagggaaacatatctaaaatgctgatattaactgtaaataccaccccgccacacacacatacacacgtattcaattctttctctactaacactctgtgtaggtaacaccacattggtttctgtataaagatttagaaatgcctcaaatccaatgggcggagacagggtgttccctgtggattatccactgattgcattatcactcgctttctctataaaaaggggaaccagatgcagaagtcactgcattttccggcaagccaagggttgtctgcatctcaagagtggggtcagcaagagaaactctacggctatgggagagcctgcgttcacctcttttccgagcccacctgttctggtgagtacgggatatttattgattacaggaatgtccatatgtgtcctttttccttctgtaagacagctttacagttagcagtgggttgttcttaaaactggatgttgtggaacgttatacctcaggtgttaatatctgttgaataatgttcaaagtattctcatttttgcccatgaaactgtatggggataatagctttgaattttttttaaaaatccaacatcactaggaaagggaagaagtatgatttggccttgcagtcttcaaattgtctccttctctggaaagctcctgaaccagaaattgcttggtccgtttttttaaaaaaacaaaaaacaaaaaaaattagttctctggtaaaatttcatgatgagttgcttattccctaaactcactgtcacgattcattgtagtgaatttcttttctgtttctctgtttctcctccttccatccctctctgtcactcccttcttcttcatcatggaacttacttatatctgatattccaccagaaatttgtttttagtgcgtttattatgtcttccttctcaccaagatgaaaatcaacagagtggtgatttatgaagtttacttctggatcaggggttctactgcacagcttggcacatcataagtgccccgtaactaaggggactaaataattttccctccaaaggggaacatcttgggtcagtattaatctttatgccaggggtactgtaaggggtagtattaatctttatgccaggacaacgaaaaatgaaatgaggaggacagaaacaaaggctttaaaatggaaagtgcactgatgaggtttgtgggggaaacagctttatgagactagagtcttccaattgagttagagcaagaaaggacgtcaaatcttaggaggcgcttgatcatctttctcagtatgtcatcaaaagattctctcatggtatacctctagttaattgagcttattagaaacagaaagcaacatggtgtttctgaggtttttcttcatgagcaggaggtgttcaggtgaaggtgggatctgggtgtggcagtgagtatttaaggtggcgagtgcaggatttctttggaaaccagagagtcaaggagctatgaaaatgacgttgtgtcctgaagcacagcagaaagagatacagagaagcgtgaggtcttggtgaacagggaagtctgggatcccggtgtcctgttggggatgggttaggaggcaccaccagcatctgtgtagctgacagtggcagggaagagaagagaggggtgtcctctgaggaggatgaggagggacaaggtctggaactgaccctgggtcatgaccttgagcatttagtccttgactcgcatcagcccgatgaggtcccaggacccagtgtcaatgcctggagctcctgccagcagcatcagggtcacacggagaaatgcagactctagggtccaccccagacttacttgggttcaggtccacatatctgactttagcaagccctgcaggggctgaggatgtacactgccatttgagacacatttccccagaaagagaggctggtgggaagattccactgagctgagagaagccccccacagctgatcttctcctgtctccagttggttgaaatttcacattttcttttcttttcttttgaaaggggaagctcaaaagaaacatgatgccctgggctttacagaagaaacgagaaatccacatggccaaggcccatcggagacgagctgcgaggtctgctctccccatgagactcaccagctgcatcttccggaggccggtgacaaggatcaggtctcatcctgacaaccaggtcagacgcagaaaaggggacgagcacctggagaagccgcagcaactctgcgcctaccggagactgcaggccctgcagccctgcagcagccaaggagaaggttcaagtccactgcatttggagagcgtcttaagtatccttgcaccggggacggccggtgaatctctggacagagctggtgctgagcgtgtgcgcatcccgcttgagcccacccctgggcggtttccagctgtggcaggggggccaaccccaggaatgggttgtcagctcccaccgcccctctctggccaattggtgactcctgcagatatccggagacaggccaggagggtgaagaaagccagggagagactggccaaggccttgcaggcagacaggctggccaggcaggcagaaatgctgacaggtgggtgaagctcagtcctgggctttcggtccctttcttttaatgcccatcctcattcctactctgaattgtcacacttttcccttccccaccagttctttaataaaagtatttgaaaggcaacaggtgtaaggagtggatgtttttgtggtgagaaattgggttttatgggatgaggaaggagacctttacatgtcactgtacatctcagtttctgtttaccatgattttaattaattgtttttttttgtttgtttgtttgttttgagacggagtcttgctctgttgcccaggctggagtgcaatggcgcgatctcggctcactgcaacctccacctcccgggttcaagtgattctcctgcctcagcttcccgagtagctgggattacaggtgcccaccaccatgcccggatattttttgtatttttagtagagatggggtttcaccatgctggccaggctggtcttgaactgctgacctcagcaatctgcccacctcggccttccaaagtactgggattacaggcataagccaccttgcctggccgttaattagtttttgtattaaattctaatttaatctttggcctggcgctgtggcttatgcctgtagtcccagcactttgggaggcggagcagggcagatcgtctgaggtcaggagttcaggaccagcctggccaatatggcgaaaccccatctctactaaaaataactaatcaggtgtgggggcggatgcctgtaatcccagctactggagaggctgaggcaagagaattggttgaaccaaggaggcagaggttgcagtgagccaaaatggtgccactgtactccagccttggtgaaactttgtctcaaaacaaaaattccaatttaattttcaaatgaagtcctttaaaaatgaaatgaaattctgtaattttaaatgaaacgaatacattacattataatttgttaaaaatgtattacattttcatttttaaattgagttttcattgtttgaaattttcgaattaggggaacatgtacatgtttgttacatggatatatcgcttaacggtgggggttgcttttgtagtttatgggttacccaaatactgaatatcgtacccagtagctaagttttcaacccatgggtaaactcaattaacctagcctgaaggattattcagtgtttagacattacattttctccctatagtatacgttctcaaggcgaagttggtacgtatcccaagattttttttttaatgaaacatttttaccccatttactctgatgtggttatcagacattttgtgcctgtatcaaaatatctcacgtaccacataaatatatacacatactacgtccctgcccgctgtttgactttgagtttccttacctctttatcattgatcgaaacatggaatggaatacctcatggtaattattttatgcatctcgggttaggtggaaactactggttgttttcactctagcagagttagggtggcaggaagtgcccatcagcagatgctactgcacaccagcccgggcgacagagcaagactctgtgtctaaaaatagatatataatttatatataattataaatacattatatataatttatacataattataaatacattatgtataataaaattatatactatataattatattatatactataatatatttcttatataattatattataatataatttatatgttatataattatattttatattataatataatgtatgttatataattatattttatattataatataatttatatgttatataattatattatatattataatacaatttatatgttatataattatatattataatataatttatatgttatataattatattatatattataatataatttatatgttatttaattatattataaattataatataatttatatagtatataattatacatattatatattaaaatataatttgtatattatataattatatatattaaaatataatttatatattatataattatatatattatgtattataattatatttatatattatatttatataattatatgtaatatatttaattatataatataattatataatatatacgtatattacataattatgatatataattatatataattatattatatatattatattattataatataatatatataatattatattatataattatatatattatatatatatattatatattataatattatatataatatatattatatatatattatattatatatatataatatattatattatatataataattataaaatataatatatattatattatataatatataattatacataactatattatatataatatataatataatataatatgaaataattttatataattatattatattatatatattatatattatatattacatattatatatattatatataatatatactatataatataataaaatatatattatacataatatataatataataatatataattatatataatatatataatatactataatataattatatataattatatataatacagttatgtataattatatattatataatataatatatattatattatataattataatatatataattatatataattatataatataccgatatagtatatattatacaattatattatataattatataaatatgatatataaatataattataatatataatatataattacataatatataaattatatattaatatataatatatgtaagtatataatatataaattatattatatatataatataattatataacatataaattatattatatatataatataattatataacatataaattatattatatatataatataattatataacatataaattatattatatatataatataattatataacatataaattatattatatataatataattctataacatataaattatattatatataatataattatataacatataaattatattatatataatataattatataacatataaattatattatatataatataattatataacatataaattatattatatataaaatataattatataacatataaattatattataatataaaatataattatatcacgtataaattatattataatataattatataagaaatatattatagtatataatataattatatagtatataattgtattatacataatgtatttataattatgtataaattatatataatgtatttataattatatataaattatatataatgtatttataattatatataaattatatataatgtatttataattatatataaattatatatttatttttagacacagagtcttgctctgtcgcccgggctggtgtgcagtagcatctgctgatgggcacttcctgccaccctaactctgctagagtgaaaacaaccagtagtttccacctaacccgagatgcataaaataattaccatgaagtattccattccatgtttcgatcaatgataaagaggtaaggaaactcaaagtcaaacagcgggcagggacgtagtatgtgtatatatttatgtggtatgtgagatattttgatacaggcacaaaatgtctgataaccacatcagagtaaatggggtaaaaatgtttcattaaaaaaaaaatcttgggatacgtaccaacttcgccttgagaacgtatactatagggagaaaatgtaatctctaaacactgaataatccttcaggctaggttaattgagtttacccatgggttgaaaacttagctactgggtacgatgattagtatttgggtaacccataaactacaaaaccaacccccaccgttaagcgatatatccatgtaacaaacatgtacacatgtacccctaaatcgaaaatttcaaacaatgaaaactcaatttaaaaatgaaaatgtaatacatttttaacaaattataatgtaatgtattcgtttcatttaaaattacagaatttcatttcatttttaaaggatttcatttgaaaattaaattggaatttttgttttgagacaaagtttcaccaaggctggagtacagtggcaccattttggctcactgcaacctctgcctccttggttcaaccgattctcttgcctcagcctctccagtagctgggattacagacatccgcccccacacctgattagttatttttagtagagatggggtttcgccatattggccaggctggtcctgaactcctgacctcagacgatctgccctgctccgcctcccaaagtgctgggactacaggcataagccacagcgccaggccaaagattaaattagaatttaatacaaaaactaattaacagccgggcaaggtggcttatgcctgtaatcccagtactttggaaggccgaggtgggcagattgctgaggtcagcagttcaagaccagcctggccagcctggtgaaaccccatctctactaaaaatgcaaaaaatatccgggcatggtggtgggcacctgtaatcccagctactcgggaagctgaggcaggagaatcacttgaacccgggaggtggaggttgcagtgagccgagatcgcgccattgcactccagcctgggcaacagagcaagactccgtctcaaaacaaacaaacaaacaaaaaaaaacaattaattaaaatcatggtaaacagaaactgagatgtacagtgacatgtaaaggtctccttcctcatcccataaaacccaatttctcaccacaaaaccatccactccttacacctgttgcctttcaaatacttttattaaagaactggtggggaagggaaaagtgtgacaattcagagtaggaatgaggatgggcattaaaagaaagggaccgaaagcccaggactgcgcttcatctacatgtcagcatttctgcctgcctggccagcctgtctgcctgcaaggccttggccagtctctccctggctttcttcaccctcctggcctgtctccggatatctgcaggagtcaccaattggccagagaggggcggtgggagctgacaacccattcctggggttggcccccctgccacagctggaaaccgcccaggggtgggctcaagcgggatgcgcacacgctcagcaccagctctgtccagagattcaccggccgtccccggtgcaaggatacttaagacgctctccaaatgcagtggacttgaaccttctccttggctgctgcagggctgcagggcctgcagtctccggtaggcgcagagttgctgcggcttctccaggtgctcgtccccttttctgcgtctgacctggttgtcaggatgagacctgatccttgtcaccggcctccggaagatgcagctggtgagtctcatggggagagcagacctcgcagctcgtctccgatgggccttggccatgtggatttctcgtttcttctgtaaagcccagggcatcatgtttcttttgagcttcccctttcaaaagaaaagaaaagaaaatgtgaaatttcaaccaattggagacaggagaagatcagctgtggggggcttctctcagctcagtggaatcttcccaccagcctctctttctggggaaatgtgtctcaaatggcagtgtacatcctcagcccctgcagggcttgctaaagtcagatatgtggacctgaacccaagtaagtctggggtggaccctagagtctgcatttctccgtgtgaccctgatgctgctggcaggagctccaggcattgacactgggtcctgggacctcatcgggctgatgcgagtcaaggactaaatgctcaaggtcatgacccagggtcagttccagaccttgtccctcctcatcctcctcagaggacacccctctcttctcttccctgccactgtcagctacacagatgctggtggtgcctcctaacccatccccaacaggacaccgggatcccagacttccctgttcaccaagacctcacgcttctctgtatctctttctgctgtgcttcaggacacaacgtcattttcatagctccttgactctctggtttccaaagaaatcctgcactcgccaccttaaatactcactgccacacccagatcccaccttcacctgaacacctcctgctcatgaagaaaaacctcagaaacaccatgttgctttctgtttctaataagctcaattaactagaggtataccatgagagaatcttttgatgacatactgagaaagatgatcaagcgcctcctaagatttgacgtcctttcttgctctaactcaattggaagactctagtctcataaagctgtttcccccacaaacctcatcagtgcactttccattttaaagcctttgtttctgtcctcctcatttcatttttcgttgtcctggcataaagattaatactaccccttacagtacccctggcataaagattaatactgacccaagatgttcccctttggagggaaaattatttagtccccttagttacggggcacttatgatgtgccaagctgtgcagtagaacccctgatccagaagtaaacttcataaatcaccactctgttgattttcatcttggtgagaaggaagacataataaacgcactaaaaacaaatttctggtggaatatcagatataagtaagttccatgatgaagaagaagggagtgacagagagggatggaaggaggagaaacagagaaacagaaaagaaattcactacaatgaatcgtgacagtgagtttagggaataagcaactcatcatgaaattttaccagagaactaattttttttgttttttgtttttttaaaaaaacggaccaagcaatttctggttcaggagctttccagagaaggagacaatttgaagactgcaaggccaaatcatacttcttccctttcctagtgatgttggatttttaaaaaaaaattcaaagctattatccccatacagtttcatgggcaaaaatgagaatactttgaacattattcaacagatattaccacctgaggtatcactttccacaacatccagttttaagaacaacccactgctaactgtaaagctgtcttacagaaggaaaaaggacacatatggacattcctgtaatcaataaatatcccgtactcaccagaacaggtgggctcggaaaagaggtgaacgcaggctctcccatagccgtagagtttctcttgctgaccccactcttgagatgcagacaacccttggcttgccggaaaatgcagtgacttctgcatctggttcccctttttatagagaaagcgagtgataatgcaatcagtggataatccacagggaacaccctgtctccgcccattggatttgaggcatttctaaatctttatacagaaaccaatgtggtgttacctacacagagtgttagtagagaaagaattgaatacgtgtgtatgtgtgtgtggcggggtggtatttacagttaatatcagcattttagatatgtttccctttttctcccagttttccaaacatctttgaatactttctatagaaataggaatggaattgtctatgtacataaatgttcacgtaatatttgatttaataacaacaactaaagaccatttaaatgttctttaagaaaagaaagcccaaaacttttattcacaatcctatagaatatatcacacagttgttgcaaagaaattactactttggccgggagaggtggcttacgcctataatcccagcactttgggagaccaaggcaggtagatcacctgaggtcaagagttcgagaccagcctggccaacatggtgaaaccccatttctactaaaaatacaaaacttaccctggtgtggtggcatgcacctgtaatcccagctactcgggaggctgaggcaggagaatcgcttgaacctgggagggagaggttgcggtgagccgagatcgcaccactgcagctcagcatgggcgacagagtgagactccatctcaaaaaaaaaaaaaaaaaaaagttctatttcgtgcatttacatttaatataattaccagtaaatttgaaattgtttcaatcatctcatttttcctaggttttgacttaactgactcacgttccttttgcctttacttgactgactttgaattaaatatgtttattattttattgttatctccatgaacttgctagttacagccatacaaatctgtgtagttatgctaataattaaatcatatactctgatacaattaattactttaacccctcccacaaaatgctaatactttagaacacttttaattctctttttagctgtttctgacttttgtattaccattctcatgcatattaattctacacatattttactctccaggagacatttctagtattgcttcataaagcaatatgcactaatatttacctacagcttatcttgtgcattcatctttgttcctttctgcatttctagcattcaatctgggattatttccctgtggacttgagaattcattctagtatttttcttctaattcaatgctgctaacaactaattgttttcctttacacttttatttaggcatctttatttgggggcaatattgctgtcaggtacgggtgtctggtttgacaaatttctttcagcatattagaaatggtgccccactgatgtctatctcattttacctgtgttgagatgtcagctgtcaggcttttccttgcttctttgctttccacattctctaaactctttctcgttgtggttggtttgtaggccacagtgtagctcattattgcttcctgtgtatttcctttgcctagagggtgtggagtcaattgcatctgtgggttgatgtctttcattggtttggaaggtgcatatgtatccttcacttctgatatccattcttgtccaagttctctctactcttcttttaatcacatcccacttgtctctgaagtttccaatgttgttcatgctttggtgggaatatttgctcttgaaccttgttccactttgctaatctaccttttttctaggttcagtctcattttaattttccttccttccttccttccttccttccttccttccttccttccttcctgtcttccttccttcctgtcttcctttcttttctctcttttctttcgagatggggtctcactctgtcacccaggctggagagcagtggcgggatctcagctcactgcaacctctgcctcccgggttcaatgattctcctgcttcagcctcccaagtagctgggactacaggcacatgccaccacacccagcttatttttgtattttttgtcgagacggggtttcaccatgttggccagggtggtctcgaactactgacctcaagtgattcacctgccttggcctctcaaagtgctaggattacaggcgtgagccaccgtgcctggcctaatttcttatactcttagtttcagttctaagtataaaacacagtaaatagctttaattaaaaactaggtagaagaacagcttcacagtcaatgaggagataatctgccttcttgatacaatgaaactctaaatagaaaggagaaaattcaaatttgaaccatattaagatacattaagagcaactattcattcaaatacatcagtaagagagaaagcgtggaaaaccggagtgggggaagaggtttggatcctgtacccccaggaaagtacatcaagccagagtatatatataaaaaaaatcttaatatttaaaaaaaagagaataatgtcaaacaaacagagaaaaataatgaaaacacacttgaaactgggtgaaaaacttgaatggatcctacacaaaagaatataaacaagtgaccgtaaaaaattattatcatcattattattattattaattttcaggtggagtcttgttctgtcacccaggctggagtgcagtggcacgatcttggctcgccgcaactctgccttctgggttcaagcgattctcctgcctcagcctcctgagtaggtgggattacaggctcccaccaccacgtccagctaatttttgtattttgagtagaaacagggttttaccgtgttgcccaggctggtcttgaactcctgacctcaagtgatccacccgccttggcctcccaaattgctgagattacaggcatgagctaccgcgcccggcctaaatgaccagcaaaatttgagcaaatgtttaacccttttagcttcagggaaatgctaaaaaaataaaaattacaatgagatactattatatagatatcaacttagctaaagggaaaaacgcagaaacaccaagtgctgactagattatggagggaccagtctttcccgtaaggatagtgggagtttaaattggaataaccgctttggaaaactatatgcaaacatctattaaagctgtatagggccaggcatggtggtttatgcctgtaatcccagcattttgggaagcagaggtgggaggatcgcttgagctcagtagtctagaagcaacttggacaacataggaagaccttatctctacaaaaaataaaaaataagcattgtcaggcatggtgatgcctgcctgtagtcccatctacttaggaggctgaagtgggaggatcacttgagcccaggagatcaaggctgtagtgagttgtgattgagctactgcactccagcctgggtgacagagcaagaccctgtctcaaaaacaaaagctgtaggctgggcacagtggcttacgcctgtaatcccagcactttaggaggctgaagcgcgcggattacttgaggtcaggagtttgagaccagcctggccgacatggtgaaacctcctctctattgaaaatacaaaaaaattagccaggcatggtggcgtacgcctgtagtctcagctactcgggaggctgatgcaggagaattgcttgaacccagaggtggaggttgcggtgagacaagattgcgccactgcactccagcctgggtgagagagagactgtctcaaaagaacaaacaggcggtggctcaagcttgtaatcccagcactttgggaggccgaggcaggcagatcacctgagatcaggaattcaagaccagccaggcaaacatggtgaaacaccatctccacaaaaatacaaaaattagctaggcctgatggtgggtgcctgtaatcccggctagttgggaggctgaggtgggagaattgcttgaacctgggaggcgagggttgcagtgagccgagatcgtgccactacactccagcctgggcaacagatcgagactccgtctcaaacaaaccccaaaagccgtataaacgtctaccctcttcccttgcacacagcatttatctcaacattgtacatgcgtgcccaccaatttcatgttctgcggggcacagaacctgcagtcataatagctcttgtcagaaaccagccaatgaacagcaggagaatgaataaatactggggcatctgcacccatcggatcttctcacagcaatcagaactcacaaatgacaaccggcacaaccttaagccttgatctctcaaagctgaggttaatccaaacccaagacagtgcataccatgtggttccctacacgtgaaacaaaaaccagccaaactaatcctaggtgctgttacaacagagggtgcctttgtgggaggcaggatggggtagcaggaaaaggcacctggggatgaatccgctattctattcattgatttcagtgctgggcatgagtgcgttcagtttgtgaaagttcgtgaagatgtatgtgtctgattttttgcactttgctctatgtaagttctatggcaataacaattgaggaaaagagactgagatataaactcccgcttatggccaatctgtggcaaacttccaccccataaaacaacctcaggaataccgccttgtatactgggaatttgccgaaagagtagatttcagctactctttctacacacacgtacacaaaggtaattacatcaggagacggatatgttcctttgcttcattgtagtaatcatttcgctacatatacgtgcatcaaaacatcatgtatgccttaaatacatacaattaaaaacaacacaggctgggcgcagtggctcacgcctgtaatcccagcactttgggaggccaaggcgggtggatcacgaggtcaggagatcaagaccatcctggctaacacggtgaaaccctgtctttactaaaaatacaaaaaatagccgggtatggtggggggcacctgtagtcccagctacttgggaggctgaggcaggagaatggcgtgaacctgggaggtggagcttgcagtgagccgagatagcgccgctgcactccagcctgagcaacagagcgaaactctgtctcaaaaaacaaacaaacaatcaaacaaacaaaacccccacacacctgggtgcagtggctcgcgcctctaatcgcagcactttgagaggccgaggcaggtgaattggttgaggccaggagtttgagaccagcctggccaacatgatgaaaccctgttgctactaaaaatacaaaaattagccaggcatggtggtgggcacctgtaatcccagctacttgggaggctgaggtacatgaatcccttgaacctgggaggtggaggttgcagtgatctgagatcacgccactgcactccagctggggtgagagtgagaatttgtctcaaaacaaacaaacaaacacccaacacctaatagataaacagataaaaaaaatacaatttctgcagccttggtctctgcagtgactactcagttttttcttatgatttttcacaatcttttccttgtgtaaatcctcctggtttgatctttggggatgcagagaaatactggctattttgccaatttggacctgggactaggaagtttaagacacaattagggccgggtgcggtggctcacgcctgtaatcccagcactttgggaggccaaagcaggaggatcatgaggtcaggagctgagaccgtcctggctaacactgtgaaaccccgtctctactgaaaaatacaaaaaaaattagctgggcgtggtggtgggggcctgtagtcccagctactcgggaggctgaggcaggagaatggcgtgaacccaggagacagagcttgcagtgagctgagatcgcgccactgcactccagcctgggcgacagagcaagactccgtctcaaattaaaaaaaaaaaaaaaagacacaattagcttacagatttaatcctgtagggcaatttcaaggtactgatgtctccctcagcacctcagcaaactccattatatggatgcaaatgatcctgcctgggatccagacaccagtccttttaaattttactgtgaaattcaaatgagctgcaaaatctgagacccccgaaatgacagaaatgtcctcttcttgacttagaaatgaaggacttagagttcctttttttttttttttttttttttttgcgatagaatctggctctgtcacccaggctggagtgcagtggtgcgatctcagctcactgcaaattccgcctcccggattcaagcaattctcctgcctcagcctctcgagtcactgttattacaggtgcccaccaccaagcctagctaacttttgtattttttttttttttcgaaacagagtcttgctctgtcgtgcaggctggagtgcactggtgcgatcttggctcactgcaacctctgccccctgggttcaagcaattatcctgcctcagcctcctgagtagctgggattacaggcacctgccaccacgcccagctaatttttgtatttttagtagcgatgaggtttcaccatgttggccaggctggtcttaaactcctgacctcaagtgatccaaccacctcggcctcctaaagtgctaggattacaggcgtgagccaccacacccggcctaatttttgtatttttagtagagatggggtttcaccaagttggccaggctggtcacaaactcctgacctcaaatgatctgtccgcctcggcctcccagagtgctgggataacaggtgtaaaccaccctgccctggcaggacttggagttcttaaaaataataataacaataaattctgtttgggaggctgaggtgggcagatcacttgaggtcaggacaagaccagcctggccaacatgatgaaaccctgactctaccaagaatacaaaaattagctgggcgtggctgggcgtggtggctcatgcctgtcatcccagcactttgggaggctgaggcaggtggatcacctgaggtcgggagtttgagaccagcctggccgacgtggtgatacctcgtctctactaaaaaaaatacaaaaaatagccggatgtggtggcaggcgcctgtaatcccagctacttggaacttggaaggctgaggcaggagaactgcttgaacctggcaggtggaggttgcagtgagccgagatcacgtcattgcactccagcctgggcaacagagcaagactctgtctccaagaaaaaaaaattagctgggcgtggtgtcttgggcctgtaaacccagctacttgggaggctgaggcaggagaattgcttaaacccgggaggtggaggttgcagtgagccgagatcacgtcattgcactccagcctgggcaacagagggagactctaaataaataaataaataaataaatgatttctgatttcctggcccctcccgtaggcatccggagacactggtctggaaggcacccaggtgtgaaaacactcccaggtgtgttttctgcaaaccaaagttcaaaaccacagactccaaaccaaccagggaagtggtgtgtcatccttggctgtccttttggtctttaggggattgtaaaattcctatagcctaggctgcatccaacatcagtggaataaaaatgtgtaggggtgtgtgctaccattagtttttcaaactctccaggagattccaatgtacgttcaggttgggatacaaataaagtacatttcttcccatttaaactctcactggctacacgtgaatggtatgattgctccatagccatgtctgcacttggcattgctattttttcattttagccaaacagaagtgtatatgagtatctcatagtgatttttcatcagcgtttatctgaagctaaacagaatttgggcatgtgttcaggattgtattgaccatttatttattctctcttcaatagtgcctactgaagttttccactcattttgcacatcaatttttagtattttttttcatttgatggacatctttctagtctgtattctggcttgatgtactttactggatgcacatcatgcaaatatcttttccaatatgattttctaacacccatttctctctgcattttcattaataggagatctttctttttttttttttagatggagtctcactctgtcgcccaggctagagcgcggtatattgtgtctatatattggagtttgcaggggaggcatcggtgcattgaaattgccacaatgtgattaaatacgtaagctaattgtgtcttaaacttcctagccccaggtccaaattggtaaaatagccagcatctgtctgcctcctcaaagatcaaaccaggaagatttatacaatgaaaacatcatgaaaaataataggaaaaaactgagtagtcactgcatagaccaaggctgctgagactgtatttcttttttattaggtctgtttatttattaggtgtttttctttttgtttcttctctctttttttttttttttttttttttttttttttgagatggagtctcactctgtcgcccaggctggagtgtagtggcactatctcggctcactgcaacctttgcctcccaagttcacaccattctcctgcctcagcctcccgggtagctgggattacaggcatgcaccatcatgcccagttaattttgtatttttagtagagacggggtttctccatgttgaggctggtctcgaactcctgacctcaggtgatccgcccgactcggcctctcaaagtgctgggattacaggattgagccaccgcacccggccgacaattccattcttatttccgtagaatgctttcaaagatgtttgagagaatgggaggaaaaggaaacatatctaaaatgccgatattaactgtaaataccaccccgccacacacacggattaaattctttttctactgacattctgtgttggtaacaccatattggtttctgtataaagatttagaaatgcttcaaatccaatgggtggagacagggcgttccctatggattatccactgattgcattatcactccctctataaaagaggagctagatgcagaagccactgcattttccggcaagccaagggctgtctgtgcctcaggagtggggtcagcaggaggaactctacagctatgggagaacctgcgttcacctcttttccaagcctgcctgttctggtgagtatgggatccttattgactattgaccaaaataatgtccatttgtattcctttttctttctgtaaaacatcttcacagtttagcaagttgttctcaaaactagatgctatctcgtggaaacttataccctaggtgttaatatttgttgagtaatactcaagtaatattcaaaatattcaacaatattctaattttttgttcacggagctatctggggataatagccctgattttttaaaagtccaacaacatcactaagaaggaaaagaggtattacttggccttgcagtcttcaaattgtctctctctctggaaagttcttgaaccagaaattgcttggtccctttaaaaaaaaattttagttctctggttaaatatcatgattggttagtccttccctaaactcactgtcatgattcattgtagtgaatttctttcttttctgtttctctgtttctcctccctccatccctctctgtctctcccttcttcttcatcatggaacttaattatatctgataccctatcggaaatttgtttttagtgtgtttattatgtcttccttctcaccaagatgaaaatcaacagagtggtgatttctgcagtttacttctggatcaggggttctactgcacagcttggcacatcataagtgccctgtaactaaggagactaaataattttccctccaaaggggaacaccttgggtcgtgtaaggggtagtattaatcttaatgccaggacaacagaaatgaaatgagaaggacagaaatgaaggctttatgtttgtatctgaaacagctttatgagactagagtcttccaattgatttagagcaagaaaggatttcaaatcttaggaggggcttaatcatctttctcagtatgtcatcaaaagattctctcatggtgtaactctagttaattgagcttattagaaacagaaagcaacatggtgtttctgaggtttttcttcatgagcaggaggtgttcaggtgaaggtgggatctgggtgtggcagtgagtatttaaggtggcgagtgcaggatttctttggaaaccagagagtcaaggagctatgaaaatgacgttgtgtcctgaagcacagcagaaagagatacagagaagcgtgaggtcttggtgaacagggaagtctgggatcccggtgtcctgttggggatgggttaggaggcaccagcatctgtgtagctgacagtggcagggaagagaagagaggggtgtcctctgaggaggatgaggagggacaaggtctggaactgaccctgggtcatgaccttgagcatttagtccttgactcgcatcagcccgatgaggtcccaggacccagtgtcaatgcctggagctcctgccagcagcatcagggtcacacggagaaatgcagactctaggttccaccccagacttacttgggttcaggtccacatatctgacttcagcaaaccctgcaggtgctgaggatgtacactgccatttgagacacatttccccagaaagagaggctggtgggaagattccactgagctgagagaagccccccacagctgatcttctcctgtctccatttggttgaaatttcacattttcttttcttttgaaaggggaagctcaaaaggaacatgatgccctgggctttacagaagaaacgagaaatccacatggccaaggcccatcggagacgagctgcgaggtctgctctccccatgagactcaccagctgcatcttccggaggccggtgacaaggatcaggtctcatcctgacaaccaggtcagacgcagaaaaggggacgagcacctggagaagccgcagcaactctgcgcctaccggagactgcaggccctgcagccctgcagcagccaaggagaaggttcaagtccactgcatttggagagcgtcttaagtatccttgcaccggggacggccggtgaatctctggacagagctggtgctgagcgtgtgcgcagcccgcttgagcccacccctgggcggtttccagctgtggcaggggggccaaccccaggaatgggttgtcagctcccaccgcccctctctggccaattggtgactcctgcagatatccggagacaggccaggagggtgaagaaagccagggagagactggccaaggccttgcaggcagacaggctggccaggcgggcagaaatgctgacaggtggatgaagctcagtcttgggctttcggtccctttcttttaatgcccatcctcattcctactctgaattgtcacacttttcccttccccaccagttctttaataaaagtatttgaaaggcaacaggtgtaaggagtggatgtttttgtggtgagaaattgggttttatgggatgaggaaggagacctttacatgtcactgtacatctcagtttctgtttaccatgattttaattaattgtttttgtttgtttgtttgtttgtttgttttgagacggagtcttgctctgttgcccaggctggagtgcaatggcgcgctctcggctcactgcaacctccacctcccgggttcaagtgattctcctgcctcagcttcccgagtagctgggattacaggtgcccaccaccatgcccggatattttttgcatttttagtagagatggggtttcaccaggctggccaggctggtcttgaactgctgacctcagcaatctgcccacctcggccttccaaagtactgggattacaggcataagccaccttgcccggctgttaattagtttttgtattaaattctaatttaatctttggcctggcgctgtggcttatgcctgtagtcccagcactttgggaggcggagcagggcagatcgtctgaggtcaggagttcaggaccagcctggccaatatggcgaaaccccatctctactaaaaataactaatcaggtgtgggggcggatgcctgtaatcccagctactggagaggctgaggcaagagaatcggttgaaccaaggaggcagaggttgcagtgagccaaaatggtgccactgtactccagccttggtgaaactttatctcaaaacaaaaattctaatttaattttcaaatgaaatcctttaaaaatgaaattctgtaattttaaatgaaacgaatacattacattataatttgttaaaaatgtattacattttcatttttaaattgagttttcattgtttgaaattttcgatttaggggtacatgtgtacatgtttgttacatggatatatcgcttaacggtgggggttggttttgtagtttatgggttacccaaatactaaacatcgtacccagtagctaagttttcaacccatgggtaaattcaattaacctagcctgaaggattattcagtgtttagacattacattttctccctataatatacattctcaaggcgaagttggtacgtatcccaagattttttttttaatgaaacatttttaccccatttactctgatgtggttatcagacattttgtgcctgtatcaaaatatctcacgtaccacataaatatatacacatactacgtccctgcccgctgtttgactttgagtttccttacctctttctctttatcgttgatcaaaacatggaatggaatacttcatggtaattattttatgcatctcgggttaggtggaaactactggttgttttcactctagcagagttagggtggcaggaagtgcctatcagcagatgctactgcacaccagcccgggcgacagagcaagactctgtgtctaaaaataaatatataatttatatataattataaatacattatatataatttatatataattataaatacattatatataatttctatataattataaatacattacacataatgtatacataattataaatacattatgtataatacaattatatactatataattatattatatactataatatatttcttatataattatattataatataatttatatgttatataattatattttatattataatataatttatatgctatataattatattatatattataatataatttatatgttatataattatattatatataatataatttatatgttatataattatattatatatataatataatttatatgttatataattatattatatatataatataatttatatgttatataattatattatatatataatataatttatatgttatataattatattatatattataatataatttatatattatatacttacatatattatatattaaaatataatttatatattatgtaattatatattatatattataattatatttatatatcatatttatataattatataatataattgtataatatatactatataggtatattatataattatatataattatatatattataattatataatataatatatattatattatataatatataattatacataactgtattaaatataataatatataattatatataatatatataatatactataatataattatatataattatattatatattatgtataatatataatttatattatatagtatatataatatatataatatataatatgtaatatataatatataatatatataatatgtaatatataatatataatatatataatataatataattatataaaattatatcatattgtattataattatatattatatataatatagttatgtataattatatattatataatataatatatattatattatataattaatatatataattatatataataattagatacctatatattatataattatattatataattaataaatatattacatataattatataaatataatatataaatataattataatacataatatatataattatataatatataaattatattttaatatatataattatataatatacaaattataatttaatatataatatgtataattatatactatataaattatattataatttataatataattatataacatataaattatattataatataaaatataattatataacatataaattatattataatatataatataattatataacatataaattgtattataatatataatataattatataacatataaattatattataatataaaatataattatataacatataaattatattataatataattatataagaaatatattacagtatataatataattatatagtatataattttattatacataatgtatttataattatgtataaattatatataatgtatttataattatatataaattatatatttatttttagacacagagtcttgctctgtcgcccgggctggtgtgcagtagcatctgctgatgggcacttcctgccaccctaactctgctagagtgaaaacaaccagtagtttccacctaacccgagatgcataaaataattaccatgaagtattccattccatgtttcgatcaatgataaagacgtaaggaaactcaaagtcaaacagcgggcagggacgtagtatgtgtatatatttatgtggtacgtgagatattttgatacaggcacaaaatgtctgataaccacatcagagttaatggggtaaaaatgtttcattaaaaaaaaaatcttgggatacgtaccaacttcgccttgagaatgtatactatagggagaaaatgtaatgtctaaacactgaataatccttcaggctaggttaattgagtttacccatgggttgaaaacttagctactgggtacgatattcagtatttgggtaacccataaactacaaaaccaacccccaccgttaagcgatatatccatgtaacaaacatgtacatgttcccctaattcgaaaatttcaaacaatgaaaactcaatttaaaaatgaaaatgtaatacatttttaacaaattataatgtaatgtattcgtttcatttaaaattacagaatttcatttcatttttaaaggatttcatttgaaaattaaattggaatttttgttttgagacaaagtttcaccaaggctggagtacagtggcaccattttggctcactgcaacctctgcctccttggttcaaccgattctcttgcctcagcctctccagtagctgggattacaggcatccgcccccacacctgattagttatttttagtagagatggggtttcgccatattggccaggctggtcctgaactcctgacctcagacgatctgccctgctccgcctcccaaagtgctgggactacaggcataagccacagcgccaggccaaagattaaattagaatttaatacaaaaactaattaacggccaggcaacgtggcttatgcctgtaatcccagtactttggaaggccgaggtgggcagattgctgaggtcagcagttcaagaccagcctggccagcatggtgaaaccccatctcaactaaaaatacaaaaaatatccgggcatggtggtgggcacctgtaatcccagctactcgggacgctgaggcaggagaatcacttgaacccgggaggtggaggttgcagtgagccgagatcgcgccattgcactccagcctgggcaacagagcaagactccgtctcaaaacaaacaaacaaacaaaaaaaacaattaattaaaatcatggtaaacagaaactgagatgtacagtgacatgtaaaggtctccttcctcatcccataaaacccaatttctcaccacaaaaccatccactccttacacctgttgcctttcaaatacttttattaaagaactggtggggaagggaaaagtgtgacaattcagagtaggaatgaggatgggcattaaaagaaagggaccgaaagcccaggactgcgcttcatctacatgtcagcatttctgcctgcctggccagcctgtctgcctgcaaggccttggccagtctctccctggctttcttcaccctcctggcctgtctccggatatctgcaggagtcaccaattggccagagaggggcggtgggagctgacaacccattcctggggttggcccccctgccacagctggaaaccgcccaggggtgggctcaagcgggctgcgcacacgctcagcaccagccctgtccagagattcaccggccgtccccggtgcaaggatacttaagacgctctccaaatgcagtggacttgaaccttctccttggctgctgcagggctgcagggcctgcagtctccggtaggcgcagagttgctgcggcttctccaggtgctcgtccccttttctgcgtctgacctggttgtcaggatgagacctgatccttgtcaccggcctccggaagatgcagctggtgagtctcatggggagagcagacctcgcagctcgtctccgatgggccttggccatgtggatttctcgtttcttctgtaaagcccagggcatcatgtttcttttgagcttcccctttcaaaagaaaagaaaagaaaatgtgaaatttcaaccaattggagacaggagaagatcagctgtggggggcttctctcagctcagtggaatcttcccaccagcctctctttctggggaaatgtgtctcaaatggcagtgtacatcctcagcccctgcagggcttgctaaagtcagatatgtggacctgaacccaagtaagtctggggtggaccctagagtctgcatttctccgtgtgaccctgatgctgctggcaggagctccaggcattgacactgggtcctgggacctcatcgggctgatgcgagtcaaggactaaatgctcaaggtcatgacccagggtcagttccagaccttgtccctcctcatcctcctcagaggacacccctctcttctcttccctgccactgtcagctacacagatgctggtggtgcctcctaacccatccccaacaggacaccgggatcccagacttccctgttcaccaagacctcacgcttctctgtatctctttctgctgtgcttcaggacacaacgtcattttcatagctccttgactctctggtttccaaagaaatcctgcactcgccaccttaaatactcactgccacacccagatcccaccttcacctgaacacctcctgctcatgaagaaaaacctcagaaacaccatgttgctttctgtttctaataagctcaattaactagaggtataccatgagagaatcttttgatgacatactgagaaagatgatcaagcgcctcctaagatttgacgtcctttcttgctctaactcaattggaagactctagtctcataaagctgtttcccccacaaacctcatcagtgcactttccattttaaagcctttgtttctgtcctcctcatttcatttttcgttgtcctggcataaagattaatactaccccttacagtacccctggcataaagattaatactgacccaagatgttcccctttggagggaaaattatttagtccccttagttacggggcacttatgatgtgccaagctgtgcagtagaacccctgatccagaagtaaacttcataaatcaccactctgttgattttcatcttggtgagaaggaagacataataaacgcactaaaaacaaatttctggtggaatatcagatataagtaagttccatgatgaagaagaagggagtgacagagagggatggaaggaggagaaacagagaaacagaaaagaaattcactacaatgaatcgtgacagtgagtttagggaataagcaactcatcatgaaattttaccagagaactaattttttttgttttttgtttttttaaaaaaacggaccaagcaatttctggttcaggagctttccagagaaggagacaatttgaagactgcaaggccaaatcatacttcttccctttcctagtgatgttggatttttaaaaaaaaattcaaagctattatccccatacagtttcatgggcaaaaatgagaatactttgaacattattcaacagatattaccacctgaggtataactttccacaacatccagttttaagaacaacccactgctaactgtaaagctgtcttacagaaggaaaaaggacacatatggacattcctgtaatcaataaatatcccgtactcaccagaacaggtgggctcggaaaagaggtgaacgcaggctctcccatagccgtagagtttctcttgctgaccccactcttgagatgcagacaacccttggcttgccggaaaatgcagtgacttctgcatctggttcccctttttatagagaaagcgagtgataatgcaatcagtggataatccacagggaacaccctgtctccgcccattggatttgaggcatttctaaatctttatacagaaaccaatgtggtgttacctacacagagtgttagtagagaaagaattgaatacgtgtgtatgtgtgtgtggcggggtggtatttacagttaatatcagcattttagatatgtttccctttttctcccagttttccaaacatctttgaatactttctatagaaataggaatggaattgtctatgtacataaatgttcacgtaatatttgatttaataacaacaactaaagaccatttaaatgttctttaagaaaagaaagcccaaaacttttattcacaatcctatagaatatatcacacagttgttgcaaagaaattactactttggccgggagaggtggcttacgcctataatcccagcactttgggagaccaaggcaggtagatcacctgaggtcaagagttcgagaccagcctggccaacatggtgaaaccccatttctactaaaaatacaaaacttaccctggtgtggtggcatgcacctgtaatcccagctactcgggaggctgaggcaggagaatcgcttgaacctgggagggagaggttgcggtgagccgagatcgcaccactgcagctcagcatgggcgacagagtgagactccatctcaaaaaaaaaaaaaaaaaaaagttctatttcgtgcatttacatttaatataattaccagtaaatttgaaattgtttcaatcatctcatttttcctaggttttgacttaactgactcacgttccttttgcctttacttgactgactttgaattaaatatgtttattattttattgttatctccatgaacttgctagttacagccatacaaatctgtgtagttatgctaataattaaatcatatactctgatacaattaattactttaacccctcccacaaaatgctaatactttagaacacttttaattctctttttagctgtttctgacttttgtattaccattctcatgcatattaattctacacatattttactctccaggagacatttctagtattgcttcataaagcaatatgcactaatatttacctacagcttatcttgtgcattcatctttgttcctttctgcatttctagcattcaatctgggattatttccctgtggacttgagaattcattctagtatttttcttctaattcaatgctgctaacaactaattgttttcctttacacttttatttaggcatctttatttgggggcaatattgctgtcaggtacgggtgtctggtttgacaaatttctttcagcatattagaaatggtgccccactgatgtctatctcattttacctgtgttgagatgtcagctgtcaggcttttccttgcttctttggtttccacattctctaaactctttctcgttgtggttggtttgtaggccacagtgtagctcattattgcttcctgtgtatttcctttgcctagagggtgtggagtcaattgcatctgtgggttgatgtctttcattggtttggaaggtgcatatgtatccttcacttctgatatccattcttgtccaagttctctctactcttcttttaatcacatcccacttgtctctgaagtttccaatgttgttcatgctttggtgggaatatttgctcttgaaccttgttccactttgctaatctaccttttttctaggttcagtctcattttaattttccttccttccttccttccttccttccttccttccttccttcctgtcttccttccttcctgtcttcctttcttttctctcttttctttcgagatggggtctcactctgtcacccaggctggagagcagtggcgggatctcagctcactgcaacctctgcctcccgggttcaatgattctcctgcttcagcctcccaagtagctgggactacaggcacatgccaccacacccagcttatttttgtattttttgtcgagacggggtttcaccatgttggccagggtggtctcgaactactgacctcaagtgattcacctgccttggcctctcaaagtgctaggattacaggcgtgagccaccgtgcctggcctaatttcttatactcttagtttcagttctaagcataaaacacagtaaatagctttaattaaaaactaggtagaagaacagcttcacagtcaatgaggagataatctgccttcttgatacaatgaaactctaaatagaaaggagaaaattcaaatttgaaccatattaagatacattaagagcaactattcattcaaatacatcagtaagagagaaagcgtggaaaaccggagtgggggaagaggtttggatcctgtacccccaggaaagtacatcaagccagagtatatatataaaaaaaatcttaatatttaaaaaaaagagaataatgtcaaacaaacagagaaaaataatgaaaacacacttgaaactgggtgaaaaacttgaatggatcctacacaaaagaatataaacaagtgaccgtaaaaaattattattatcattattattattataaattttcaggtggagtcttgttctgtcacccaggctggagtgcagtggcacgatcttggctcgccgcaactctgccttctgggttcaagcgagtctcctgcctcagcctcctgagtaggtgggattacaggctcccaccaccacgtccagctaatttttgtattttgagtagaaacagggttttaccgtgttgcccaggctggtcttgaactcctgacctcaagtgatccacctgccttggcctcccaaattgctgagattacaggcatgagctaccgcgcccggcctaaatgaccagcaaaatttgagcaaatgtttaacccttttagcttcagggaaatgctaaaaaaataaaaattacaatgagatactattatacagatatctatacattatattataatatataattatattataatattatataatataattatatataaattatatataatataattatataatatataaattatatataatatataatagaattatataatatataattatattctatatagaatataattatatataattatattctatatagaatataattatatataattatattctatatacaatataaaatataattataatatataatataattataatacataatataattatatattatatacttatagataatatataataatataattatataatatattattatataattatatatataatataattaatatataattatatattatataattaaatataattatattataaattataatataattatattatatataattatatatataattatattatatataattatatatataattatattaaatataattatatattataatatattatatataattatatatataatatattatatataattatatatataatatattatatattataatatattatatataattatattatagattataatccataattatatatattataatatatataattatatgatatattataatatattatattatatataattatatattataaataatatattatattatttataatatataatattatattataatatataattatatatattataatatataattatatatattataatatattatatataattatattatagattataattaaatatatttaaattatacattataatataattaaatatatttaattatattatacattataatataattaaatatatttaattatattataatgtataatacaattatataatataaattatattataatatataattatatattttacatttcatatataatacaatatattacatataatgatagttatatataatacattatatataaatataattatatacaatagaatatgttatatataattataattatatatattatagataataaatatattcattatgtatattatattttttatattatatatttactattattggaattataatttattttatgtaattgtatattatatattataattatatattatatgtataattacaatatataatatataaattatatattatatatgtagattacatgttatatataatatatgtaaattatatattatatttatatattatatgtaaattatatttttttcatatattataatatatgtaaattgtatattatatttatatattataatatatgtgaattgtatatatctatatattataatatatgtaaattgtatattatatttatatattataatatatgtaaattatatattatatgtgtaaattatatatatttatatgtataaattatatattatatttatatagtataatatgtgtaaattatatattatgcaagtatatatagcttatatatagtataattatacaattctatataatgtaattatatattaaatatatgtaatttatataatatataatgtgtatttaatttatattatataattacattatgtgtttatatatattattatagagagagataaacaagaatctccatgtgctccccaaactgtctctgggtttccatctgtgggatgcctttcccagtgtcctaaggatcttggagagctcccttctgtggctctctgcagggagacagactatccctaaatacaactgccagacacagaacaaaactgttgccgtcatgccaggtaccacgtcagtatcttcaaccaagattggagctcttctggggtgctacagaagcccacgggtaaggagtttgggaattctacagagaaatatttgggtctcccctaatgccactctcttacatctcatcgaatggaaaggtggacactgagcttacatatccatgagagttataacagagttataaacagaccttagggaattccctgtatcatgaaatgatcatgatggtgatgatgctgatgattattattattattttggaaagaaggtctcactctgtcaaccaggttggagtgcagtggtacaatcacggctcactgatgtctcgacctcctggctcaggtgatcctcccgcctcagcctcataaggaactgggactacagatgcatgccaccacacctagctaattttgttgttgttgagaaggggtctcacaatgttgcccaggctggagtgcagtggcatgtggtatgatcatggctcactgtagtcttaacctcctgagctcaggtgatcttcctgcctcagcctcccaaggaactgtgactacaggcgcatgccaccacacctggctaatttttgtattttgggtttttttggtagagatggggtctcactatgttgcccagcctggcctcaaactgttggccccaagtgatcctcccgccctggcctcccaaactgctgagattacatgtgtgtgcccagtcaacattattaacaatagcaaggatgggaataaaacagaacgtgcagtggatgctgtgagtctcgacccagagtcctgtccatggccaatgcctccatcccccagctgctgagaatactgactgctgacagttcatagctgtgtgccttactggaaacatcaggattacaggacgccaggaattccgcaacacagagaagtaccccatcctagaatatgactttctcaggggcatccagagaccaggctcacacctataatcccagcaatttgggaggccaaggcgggcagatcacctgaagtcgggagtttgagaccagcctgaccaacatagagaaatcccgtctctactaaaaatacaaaattagcgggcgtggtggtgcaggcctgtaatcccagctacttgggaggctgaggcaggagaatcgcttgaacccggaaggcggaggttgtggtgagctgagacggcgccattacaaacaaacaaaaaaccaaaacaaaacaaaaaaaccagagaccaatgactgtcagatgctagagatacaaagagaaaatttactaaagaatttacttctgcctttcacaccaaaagagagaaatctctggtttccaacacttcctcaagacagtgaaccctttccaatacacagaagacttttactttagtaaattctggattgaccttttttttttttttcctacttgctggatcgcaaggtggaagaattgtggagcttgcccatcaaattctgccactgcactccagcctgggtgacagaggagacttggtctcaaaaataaaaataaataataaatgtatacattttgatgggtttggacatatgcacacacttatggtgccaccaccacaatcgaggtactaaatatattcattcatgtcatgcccttttcaaagtacaaggaccaggtcaggagcagtggtggctcatgcctgtaatcccagcactttgggaggccaaggcaggaagattgcttgaggccaggagttcaaaaccagcctaggcaaaatagcaagagcctgtctccataaaaaagaaaagaaaaagaaaaaaatgaaaaattagctgggcatggtggcatacacctgtaatctcacctactcaggaggtcgaggtgagcagatcacttgaggctaggagttcaagaccagctggataacatagcaagaccctatgtctacaaaaatgttttaaattagccagatgtggtggtgtgcacctgtagtcctagctcttcaggaggctgaggcagaaggatcacttgagcccagaaattcgaggctacagtgagccatgatggagccactgcactccagcctgagcagcagagtgagagatcctgtctcaaaaatatatatattattactgttagtaaaattagaaattagatggtaaattaaactttctaacattaatttttataggttataaatttttataggtatgcatccatctctgtctagatattaaatctgatttattcggctgggtccactggctcacgcctgtaatcccagcactttgggaggccgacgcaggtggatcacctgaggtcagaagttcaagaccaacctgagcaacatggtaaaaccctgcctctttttaaaaaattaaaaaaaaaaaaagactacataatatgactatgtgttagtagatgagtgattaaataaattttggtacagcaattaattggaatatcataccacttatttaagacttggctaaacactcatatctacctggaaaaaagtccatggtctgttaattttttaaagtaatctccagaataattagtatatagtattatagtatttttaaaaactattttaaaactctcaatataggaatatatattgtgataaaatgctttttctagtatttatgtagtaaattatattattacatgtcttaagtttaattttttgtagagcaaggactatagtaatggtcacctcaaagtcaaattagagaagggaaagggagttttatcttattttttactttaatttttttttttgagatggagtttcactcttgttgcccagtctggagtgcaatggcgtgatctcggctcactgcaacctctgcctcccaggttcaagcaattctcctgcctgagcctcccgagtagctgagattacaggcaccacacccggctaatttgttttgtaattttagtagagacagggtttcatcatgttggccaggctggtttcgagctcctgacctcaagtgatccacccacctctgcctcccaaagtgctgtgattacaggcatgagccaccacacccgggaaagggagttttgaattgtgttttacatactccatatttgtgagaatgagcatatattattttattaattttaaaaatctaattaaaaacttttaaataaaacaacattaagaactatgaaatgtaggggccaaccccacagggtcagtgggtttttctccctgtgtgtggagacaagagattgtagaaataaagacaaagagataaaagaaaagacagctgggactgggggaccactaccaccaagatgcagagactggtagaggccctgaatgccaggctgtgctgatatttattggatataagaaaaaggagcagggtaaggagtgtgagccatctccaatgataggtaaggtcacgtgggtcacgtgtccactggacagggggcccttccctgcctggcagccgaggcagagagagagagggagagagagagacagtttacgccattatttctgcatatcggagacttttagtactttcactaattttgccactgctatctagaaggcagagccaggtgtacaggatggaacatgaaagaggaccaggagtgtgaccactgaagcacagcatcacagggagaccgttaggcctccagataactgcaggcgagcctgattgatgtcaggccctccacaagaggtggaggagtagagtcttctctaaactcccctggggaaagggagactcccttgccccgtctgctaagtagcgggtgttcttccttgatactgacactaccgctagaccaaggtccgcttggcaacaggcgtcttcccagccgctggcgttaccgctagaccaaggaggcctctagtggccctgtccgggtataacagaaggctcgcactcgtcttctggtcacttcttactatgtcccctcagctcctatctctgtatggcctggtttttcctaggttatgattgtagagttaggattattataatattggaataaagagtaattgctacaaactaatgattaatgctattcacatataatcatatctatgatctgtatctagtataactattcttattttatatattttattatactggaacagctcatgccctcggtctcttgcctcggcacctggatggcttgttgcccacaatgaaatatgaaaaatttagcacacagatcaccatatgtttcctcatctataaatagtgatagatagtaacaccttccttataggtctctgtgaaaatatttagggataatgtatgtaaaactgtttattaccaggcaggttggaaagtaatgtcccattcatttgtccactaggatggccatagggtttttggttttttttccttttaattcttgaattccagagtcttcaaatacattccattgttgtaaagtgaatcatattcacattttttccctagagtttagcgattccttttgcatacaaattcaggctgtatgtgttcacacatagatctcaaataacatcttaattttcacaacgaaaagctcccttcctcaccctgtagcctggctcctagaagcaacttttttttttttctgatagtaattacatatttgtaagttaggtatttatactgctttttcatttatcagctttaaactatattgaattactttcttctccgaaacaattagcacataactcttacgtactgtaaaactaattttcctcaccaaacataatcatttaaggaatctggataaatcaaaattcaatgtttatcattttatgacatcaatatttaccatttgtagcatctaaaccttagccagacatgtaacaagtagtatgtcattaataattttttctcattttttcttttgatctcttaaattttaaaatttccttttttatttcttcctatgaatccaacacctattttctccaccagaaatgtagttctcttttcagtagatccagatgtgcactagacaattaatcagctttggctttcacttggagacatccctccctagtcctccctcccctcgtccccctctggatgggagaaatatgcatacatgatcccatttttgaaagaaattaggaagctcaaaatcacacaaaaaggctgggtgtggtgtggctcacacctgtaatctcagcactttgggaggccgaagtggggtatgacttgaggccatgagttctagaccatcctgggcaacacagacctcctctctacaaacaaatacaaaaatagtcaggcttggtagtgtgggaggcccgggtggaaggatggcttgagctcaggaggtcgaggctgcagtgagctatgattgcaccactgcactccagcctgggccacagagtgagaccctgtctcaaaacaaacaaacgaaaagccacacacacacacacacacacacacgccctaaatgtgtggctatatcattttaacaggcggtgaatgtggagaaatgactgaagaaaactttaaagagttcattttgcatcctgctacctgaacagttttaaaatccacaaaaagccctacacccaaaaactgacctccaccaagtcttgtcctctcagcctactagctcaaccccattccatgccccaccactgccttatcttgtccacatactcgcccaccaaacctggtattaacccacagcaagatccgcccatcaaacctaatgcccgcccacaacctcgccccggaacttagtctctgtcctgacagccccgcccccatgcctggtaccgcccacggtcccgccccagaacttctccccacccccggagctgatctccacccacactcagccctgcctccaggcctggtaccgcccacagccccgctccagagttggtccccgcccccggaactggtccccgtcaacactcaggcccgcctccaggcctggtaccgcccacagccccgctcaagagctagttccgcccccaaccctgccacagacccgcgccaggacgaccctgcctccgcggctgtccctagccagggcccaacctggttctattaataactaagcaaactagaacacctcagccggaggctggggtgcgcggctgctgcacctgcagcctgaacccgggggtcctgacacgccgcattttgggctgggaccagctggagccggaagcggaggtgcagtgtggctagccggagaccggaagcggaagcgcgcttgtgtcttgtgagaagagccgcgcttgcagcgtctgggagaatctttcggtctccgcgagaggtgcttcattccgtgagtccgagtccagagaggggccccagccgcgggcctgcgtccctcccgggagccgggtttccgcccctgaggcctcgggctgtgcgctcagttaagcccgaagctgctgtttcctccggtgtccgggccccgcgcccctgtcatcctcactctgtcgtcctcaccctgtcgccctcacccggggcgattctgcgccccaggggacttttggctatagttggagacggtttgggatgtcacaaaatggagggtaggagggactgtgctactactgtaatctagagggtggaggccagggatgctagcagctcagcatcctgcagcgcgtaaagcagccgccgccagcaaagactcatccagccccaaatgtcattagtgcccaggttgggaaaccctgctggagggcattaaaatctctgcagtcctgaatacactgtagaaattatttagaattcagccgagtccacttataaggcctaaagtgacgaatttaaagcatctggagtcaccatacaatctccagccaaatgagttaagcaagtcagatgaaaacagctttaagcttcttgtcccattttagggaccagatggctggataggaatctggtgaattcaggcacagccagtagcctgggttcttattctttaaatcaattttttttaagtgaatggggtggtctttctatgcaacaactgtattagtctcagtaaatacattttactatacgtacatattactccctacaaaaggcctcataagcgatttttgtgccctttttatttagacgaaaaaagtataattcaagctcagatttgtgttgaaaccagcctcaagtttcacctatcctcactgatccgtggacttctgtatgatcaggtaggtaccgtgtagaacctgcaagttgcaagactccactgtgtagaaaacctgtgaatggatttttcctgtgttcaggttgtaaacacaaggactcactaacagtgagggtatttttttttttttttttgagacagagtctcactccgttgcccagcctggagtgcagtggtgcgatctcagctcattgcaacatctgcctcccaggttcaagcagttctcctgcctcagcctcccaagtagctggaatgacaagggtgcaccaccacgcccagctaatttttgtatttttagtaaagatggggtgttgccatgttggccaggctggtctcgaactcctgacttcaggtgatccacccacctcggcctcctaaagtgctgggattacaggtgtgagccacgagtgagggtatcttaaaaattatttgtttgatgccttatattcaagagaaggatactaaggggtgtgtgataatgtgtgtcaaaataagtcagtaaatacagctatatgcaaatcagtacacaaaacatgtaaacactatttaaaagtttttttttcaaccttccaagacatctcaatttttcttttatttttttcttttcctaacaggcctgccagcctgtagacttatgctgtataataaggtagctgctggtccatgcggttgttttaatttaaatgtagaccaattaagattccataaaattttaaattcagcttctcagtcgcactaaccacatttcaagtgcttgacagcgacatgtggttaatgcccctattgaacagcaaagattaagatcatttccatcatcccagaaagccctgctgggcggcattgttctagtctcttcccatctgtccattgcaatgaagccagaacggctattgtaaaagataatttgtggccaggagcagtggctcaagcctgtctgtaatcccagaactttgggaggccgaggtaggtggatcacctgaggtcaggagttcaagaccagcctggccaacagggtgaaaccccgtctgtactaaaaatatataaattagctgggtgtggtgactctcttgagcctgggaggcggagactgcagtgagccaagatggcaccgctgcacttcagcctgggcaacagagcaagactgcatctcaaaaaaaaaaaaaaaaaaaaaaaaagctgggcatggtggctcacgcctgtaatcccagcacttcgggaggccaaggcaggcagatcacgaggtcaggagatcgagaccatcctggctaacgtggtgaaaccccgtctgtactaaaaatacaaaaaaaaaaaaaaagattacccgggcgtggtggcaggcgcctgtagtcccagctactcgggaggctgaggcaagggaatggcataaacccgggaggtggagcttgcagtgagccgagatcatgccagtgcactccagcctgggtgacagagcgagactccgtctcaaaaaaaaaaaaaaaaaaaaaaatacagccaggcacagtggctcacacctgtaatcccaccactttgggaggctgaggtgggcagatcgcctgaggtcaggagttcgagaccagcctggccaacatggcaaaacactgtctctactaaaaatacaaaaattagctgggcatggtggtgggcacctatgatcccagctactcgggaggctgaggcagacagaattgcttgaacccaggaggcggaggttgcagtgagccgagatctcaccattgtactccagcctgggtgacagagcaagactgtctcaaaataaatacataaagataaatttgctttagtcactcgcctgcctgaaaagcctttgctggctctccactgcctctcatgttcaaactcctcaccactctttataatacctttcaaaatacaacctttcccgtgcactctggccccttatttgtccacatgctccaaactgtgaacttggcttcctaagcagcttgctttcctgcctctgcacgtgcactttccactgagcaagaccctacctcgactctcaagactcaattcaaatgttcttagtgtttttccttccaaggcttcccagtccccttcttcccagatcctgggttggatgccatgtgcccctctgccatatcacatatcactctgaaatgcagcagcaggtctgtgtgtgtgtcctgctcccagaaagccagttcttagatgacagggatcttcctcccctccatctccagcacccagctgggggcaggtatcaataaaacgtgaatgaggggtcaacgtcgggaccctagggctgcagaagggatttgagaggaataactgggtgaggaaatgctatgcctggtttggacttgggagggaagagggggcgacccaccaggggctcacctgtgcagagttctcttctctaccgtttgtgcaacacagctgctggaagagcccactcacaaacaagtataaatacatggaactgtagagaaataatacagatatttgtttttttggttttttttgtttttttttttttgagatggagtcttactctcacccaggctagagtgcagtggcatgatctggtctcactgcaacctctgcctcctgggttcaagcgattctcctgcctcatcctcccaagtagctgggattacaggcacccaccaccatgcccagctaattttttaaatatatttttagtagagacaaggtttcaccaacttggccaggctgttcttgaactgctgacctcaggtgatccgcccacctcggcctcccaaagtgctgggattgcaggcgtgagccactgtgcctggctataatacagattttcttgcatgtcataatactaaaactttcaggcttttacatataagtacaaatatataaacttttcacatgtatatgtgaattttgggggttctgttaacaccacagagaccagatgtcagagacacttggcagctatattaactggagggtgggggctgtgaggctgcaggcaggaatgggaaagagcctcccatctctgcttggctccaagtaccagcgaacaactggcctgtggggaatggctctccattcagtcctctcccaatccttctctccccggagattgggggtatgggggtcacccaggataaattccctgggcaagagatctagaaggaagccagggcctgaatgctacatctcaatacaaattcctagagagactgagtggccctgccttccatgaatagccagcaccgtccaccctctacagctctgttttgtctacctggcccaaactcttacaagtctctaactgcagacagcgcctgcccccgcccccaccaacccctcccacacacacccttgaccactttttttttttttttccaaatggagtgttgctctgttgcccaggctggagtgcaatggtgcaatcccggctcactacaagctctgcctcccaggttcacgccattctcctgcctcagcctcccaaatagctgggattccaggtgtgtgccatcacgcccagctaattttttatttttatttttttagtagagatggggtttcaccatgttagccaggatcgtctcgatctcctgacctcgtgatccgcccgcctcggcctcccaaagtgctgggattatagacaggagccaccgcgcctggccagccgctttcatctttgtgtgtatatacacacacacacacacacacacacacagcccttcttttctcataaaaaaggaaacattccatatatgctatttggtacttttttttccccttaaatttactgacgataataacctctattgatatctagagatcttctctcttttttttttaatgggtgcactgtaatgccacagtgaataatcttacacaacttttacatttgtgtatcttacagatcgattcttagaagttgcaggaacctagggtctctgatagaaaatggctggagctctgctgggctggcatgagagtggggagtggggaggaggaaatcaactgaaatgaggggtagtgacatctgagctgggtgaggtggaaaccaggaggagggggtggtcaaggcagatcacaggctggagagggggtgaccgaggcagggcacgggctggaggggggtgaccgaggcagggcacggactggagggggggtgtgaccgaggcagggcacgggctggagagggggtgaccgaggcagggcacgggcaggagggggggtgaccgaggcagggcacgggcaggagacggggtgaccgaggcagggcacgggcaggagacggggtgaccgacgcagggcacgggctggagggggtgaccgaggcagagtgttccccccatttcttccagggtgctgtcctgagagcgctgcgggataaaggaggagcgtcctgcttcccggctgccctgttgctgtcggagtcacaggatggcggctgtcgtcctgcccccaactgccggtgagtcatggggtcctggcagttctcagagtccaggcttgaaaggtcctgacccacagcatgggatgggagggggttgggcagagcaggtgaggcaggagtggagccccaggggcccagaggtcctccgtgtctgatcgggcggctcttgggacttgggacttaggcatttgggtgtctgtggatgtcacctgtgtggtgaatgtgctggagcttttgaattctcccttcagttctttctgtgaacctgataaaaacacagtgacgccctcggaacttcagtttcctcatctgtgaagtgggaataatcccttccccaagtgcagtcagaccttaagccctgtttcctggcgtggatgcggcagggccatgctctggtttccttggattgctgtgggttggtgtttgcttggagtagaggtggatgctttgtgggtgactgtgtatgcatggggacctggtcgatcgcaggcaggtggggaagcctccagatgtgtgagtggacacagggcaggtgtggattcctggtactcatttctcctcctccagctctgtcttccctgttcccagcctctcagcgagaaggacacacagagggcggagagctggttaatgagctcctgaaaagctggctaaaggtgagtcggatgttcctttttccaaatcatgattccttcagccagaaggttggacttgatgcctttcagtggcctggagccccacggccaaacttgttcctcaggcatcccagggtctctgagtgagggctgcccagaaaatgtcagtgtgtgtcaacgtttactgcaggttcagagctccctccagagtccctgagtacatcatgtgctcctgagagttttaagggaaagccaagtaaagacgtgatgatgttctaaacccaagcaattaataaaggccatacggaaatcattcattcacttaccaagtatttctctgatttctgccatgtcacgggcccatgatcccctggagactgagggaaataagatcataggagctcccagtttgagtgagaaaagacagctgctctgcggtactgtgcgctggacctgggagtagcctaaggagacaagcattgagggctgagctcagaagccagggagaagagctcagaacctcaggagaggagctcagaatccccccacatctcgtgctcaggtttccccagccctggctctgttctcctggcccctcttcctgtgcacattggtgggggtggtccttggctaagccgtgatgtttgcaatgctttagggcttggtgacctttgaggatgtggccgtggagttcacccaggaggagtgggcattgctggaccctgcccaaaggacactgtacagggacgtgatgctggagaactgcaggaacctggcctcactgggtaagcctaatgtcattcctgcatttatttaatgactcaggaagtcagtcttttttttctttttttaaattgaggtaacacaggacacaaaagtcaccatttaaactattttaaagtgtccaatttggtggcttttcgtaggttcacagtgtagtacagccatcaccactaattccagaacatagttgtcacaccaaaaataagccccatagtcatgaaatggtctctccccagttctccctcctgaacatcttggcaggcactaatctttccgtctctatagatgtgtctcttctttttgagggggttgtttttagacagtgtctccctccgtcacccaggctatagtgcagtggcgtgatcctgagtagctgggaccacaggtgcggaccaccacgcccagctaatttgtttattttttgtagagacagggtcttgctatgttgccctggctggtctcaaactcttgggctcaggtgatcctcctgccttagcttcccaaagtgctgggattacagatgtgagctaccattcctggcccaattcttgacattttatataaatgaaatcatacaaaatgtggtcttttgtgtctcactttttgcttagcataatgttttctttctttttttttttttttttttttgagatggagtttcactctgttacccaggctggagtgcagtggtgtgatctcagcttactgcagcctccaccttccaggttcaatctgttctcctgcctcagcctcctcaacagctgggactaaaggcatgcgccaccacactcagcaaatttttgtgtttttaatagagatggggtttcaccatgttggccaggctggtcttgaactcctggcctcaagtgatccacccacctcagcctcccaaattgctgggattacagggatgagccaccacgcctggccgatgttttcaaagtacagctgtgttgtagcacatagcagaacttcattctttttatggttgaatattattccgttatgtgtatataccactttttatatatcatttcatcagctgatggaaatttagcctgttctcatcttttggctattgtgggtagtgctgctatgatcattcatatacaagattttgcttgagcacctgttttctcttgggtatatacctaggagtggaacttctgtgtcctgtggtaattctgtgtttaatgtgttgaggaatgtccaaacttttctacaactgctacaccattttacattcctaccagcagtgcatgagaccagcaacgtattagtttctctgcatccttaccaacatttgtctcttttcctttttttaaaaaattatgatagccattcttgtggttgtctgtctcattgtggtttttatttctattccctaaaaaaaatgatgagattggccatcttttcttgtgcttgttggccatttatacatcttttttgaagaaatgttcattcaagtgctttttccatttggggggcattgtttgccttttcgttattgagttgtaagagttctttatatgttctgcatcctagacctttatcaaatatatcattttcaaagatttcctcccattcagtggattgcctttttactatcttgaatgatagttttgcaggagatagaattcttggttgatatttttctttcagtacttggagtatgtcatcatcccactggcttgcggcctccatggtttctggtgacaaatcagctgttaatcttgtacatgatgacttatttctcccttgccatttttcaggatagtctgtctttggcttttgacagtttaatgttaaggtatctcagtatgagtttttaagtgtatcctattgggagatccttgagctgctttgatgtgtagacttgtaattttcatcaaatttgggaaagtttggccattatttttacatatattcctttttttttttttttcccggagtctcactctgtcgcccaggctggagtgcactggcacgatctcagctcactgcaacctctgcctcctgggttcaagcaattctccctgcctcagcctcctcagtagctaggattacaaacgcgcaccaccacagctagctaatttttgtatttttagtagagacagggtttcaccatgttggctaggctggtctcgaactcctgacctcaggtgatcctcccacctcggcttcccaaagtgctgtaattagagcgtgacccattgcaccttgccaatttttccatatattccttctgctcctttctctgtctcctctccagtagcaactcccattatgtgtattcagatgtttgatggtatcttctgggtttcttaggctctgttcatttttttccctttatttttaatttctgctctacagatcaggcaatcttaattgacctgtcatcaagttcactaattgtgtcttctgcctgatcaagtcttctgatgaacccctctagtacatttttcatttcagataatatatatttttcaattttaaaattcctatttggctcctttttataatttccatctctttatgattttctctatttggtgagaattcattctcatggtttccattagttctttgtacacagtttccattaactccttgagcatatttgaaatagttgatttgaagtcgttgcctaataaatccaatgactaggtttccttatggaaaatttctgttcatttcttttttcctataatgcagtttcattcattttttgtttctttttttttttttttttttgagatggagtctcactctgtcacccaggctggagtgcagtggtgcaatcttggctaactgcaagctctgcctcccaggttcacgccattctcctgcctcagcctcccgagtagctgggactacaggcgcccaccaccacgcctcgctaattttttatatatttagtagagacagggttcaccgtgttagccaggatgatctcgatctcctgaccttgtgatccgcccaccttggcctcccaaagtgctgggattacagccatgagccaccgcgcccggcccatttttttgtttctttacatgcctcataatttatttgctgaaaactactttcagaatattacaatatggcagttctttaaatctgatttcccccctccccaaggtttgttgtagttggtattgtttctttgtttagtgacatttctgaactaattttgtaacgtctgtattggtcatgtgtggccactgaagtctctgttctgttagcttagtgttcagcttgggattaatttgtcagagatttttttaaatacctggaacccaaaagatgaccagtctttgccaatggatctgaattacatgttggagcatgccttcaaaactcagctaaagcatcttacaactctgacttagccttcagttccttcttatgcagagcctgaaggtcagtcaaaggtgagggcttggtgccttctcagatcttctctgagcatgtgttcatccctgggtatgagcatggccttctagaaatgtgtggaggccgggcgcagtggctcatgcctgtaatcccagcactttgggaggctgaggtgggcggatcacctgaggtcaggagttggagaccagcctggccaagatggtgaaaccacatctttactaaaaatacaaaaaaatcagccaggcgtggtggcaaatgcttgtaatcccagctacttgggaggctgaggcaggagaattgcttgaacccaggaggtggaggttgcagtgagccgagatcacaccactgcactctagcctgggcgacagagcaagactccatcttgtgggggaaaagaaggtgtggaaagatgctctactcctcagagcatcttgttcccaacttctcctcccaggttttttggttagtcttttgtttgcttcacagttttcccttgccccattgagcagtggctgatttgcctttagatgtgttgggacacacttccctctccaccctccagcttccataggtgtagcctcttcagacctgggagagtttggagttacacaaataaagggaagccctttgatccagcccatcagggagccagcagacaggtcagaagagaacagccacaggtttttgagaataaggtgcattctgttcccttcagcactagaaacacaggttgttgtcctcaaggcaaaatggggaatagagtgtgcagctagagtcagttaaaatgtcacaaatctctcttacccagattcagctgtttgtcttgattaggcattctcctgtggctgtaaacttttgatgacattcaagagctccaatgaagttgattctgtgtttgcccatttacatactgtttttgtgaagggatggagttgtggagttccctactccactaccttcactgacattacttcgtttaagtccttcataagcacctctgttcctaggtctgtgctgggatgtgggagtagtgaagaatgcaacagacatgccccccaccctcatggagctgtctgtctaatgctatctgtatgaaatgaagatctccttctttccctgactatatattctctgtagttaaatcttttgggctttcagattctgtatttaaacctggacaggggctcctgggaccagttatcctgcaaccaccctagatattgcttgtggggtgtgtgtgtgtgtgtgtgtgtgtgtgtgtgtgtgtgtgtgtgtgtgtgtgagtgtttaagacggttgctatatttattcaattttggcataattatttctctgctcctgaagtcacacctcttcaccttcagaactgatttcagtttcatgggagagcttgtctgctgcacagtccccctacatcatgtgtcttttctccatgtacagggaaccaagttgataaacctaggctgatctcccagctggagcaagaagataaagtgatgacagaagagagaggaattctctcaggtacctgtccaggtgagcaccaggtggatataagtccttgtgaggaacagctctggccagggactgagaagttgggagtattataatacattaggaaatatcagtcagagaactgtgtaaatgccccttttcccaagaaggccaagaacgtttggtctgagccccctcatgtaccttcatgacttccaactttctgtcatctcatactttacttgggcctcaggggagaaaaaaagacatctctttttctgaaatttaagtctcctatgagctctttgatcagtttcagtccaccttgccttcctgacaattccttcattctgtcaacatcaatctcaatcttcctagagtctttcttaaacattgcctaaaattttcacacccatatctctttcaccgaatgccttctcaaaaaccctcacctctcagattctgccttcactcacgtatgcattttactatttcaccatcaacttaaaatttgcctcttttctatcaacttaaatttctttttaacttgtttcagatgtggagaatccatttaaagccaaagggttaactcctaagctgcatgtttttcgaaaagaacaatctagaaatatgaaaatggtaagactaacatgggtgattcctggtttttttcatggtagaatgccctacatgagaaaagccacaaggactggccttgttggccaggcacagtggctcatgcctttaatcccagcaccttgggaagctgaggcagttggatcatgaggtcaggtcaggagttggagaccagcctggccaatacggtgaaaccccatctctactaaaaatacaaaaaaaacttagctgggtgtggtgatgcgcacctgtaatcccaaatacttgggaagctgaaacagaagaatcacttgaaccctggaggtggagcttgcagtgagccgagattgtgccactgcactccagcctggcgacagagcaagactctgtctcaaaaaaaaaaaaaaaaaaagtggctttattaaatagttattaaaggaaagtgtcatttttttcaaagataaagtagtacctctggagagatactgtgaaattattttgaatttggagaaaagcattagttagccccaaacttgtttttcctgagaattcccacaagtaaatatttccagtagtctgagtcagatattggatatttgaaaaagaaattagccttaaatttatcaaaaatactctgtgaatatgataaagatttgtagaaagaatccatcttctttaaatgctaagaattcaaactgacagaagccatgtaccagcactcatgatggcaaaaacattaattccaatactatgatacacaacagaattcctgggagaggaaattcctctgacagcattcaatgttaaaaatattataaatggtacttattgtcatctcttaatcaataggagaggaatcatcttggagcaacactcaacgaatgtaatcagtgttttaaagtcttcagcacaaaatcttcccttacacggcacaggaagattcatactggagaaagaccctatggctgcagtgaatgtgggaaatcctacagcagtagatcttaccttgctgttcataagagaatccacaatggggagaaaccctatgaatgcaatgactgtgggaaaaccttcagcagcagatcttaccttactgttcataagagaatccacaatggggagaaaccctacgaatgcagtgactgtgggaaaaccttcagcaattcctcatacctcagaccgcacttgagaattcacactggagaaaaaccgtacaaatgtaaccagtgttttcgtgagttccgcactcagtcaatcttcacaaggcacaagagagttcatacgggggagggtcattatgtatgtaatcagtgtggaaaggctttcggcacgaggtcatctctttcttcgcactatagcattcatacaggggagtacccttacgaatgccacgattgtgggagaaccttcaggaggaggtcgaatctgacacagcacataagaactcatactggagaaaaaccctacacatgtaatgagtgtgggaaatcctttaccaatagcttttctcttacaattcacaggagaatacataatggagagaaatcctatgagtgcagtgattgtggaaaatcctttaatgttctctcatccgttaagaaacacatgagaactcacactggaaaaaaaccctatgaatgtaattattgcgggaaatccttcacaagtaactcctacctttctgtgcatacgagaatgcataataggcaaatgtgaattcaataactgtgggaaaagcattcattgatctttcatgcctcagataacatgagcaaactctaacaagatgtatgaatcacctgctactgtgtaacaaattaccccccaaaattttgtggcttcaaacaaaaacacttgttatctcaaaatttttgtaggtcaggaattcagaaacaacatagctctatagttcttcaggatatctcaagaggttacagtccagatgtcagcagaactgtaatcatccagaattgttactggtgaagggaccacttccaaatggcttacaagcccgacaagtgcatgctagctgtttccaagggagctgcgcttccaaatcacgtaggcctctcaacagggctgagtttctttatggaagcaacttctccccaaagccagtgatctaaaggagccaacacagaaagcataatgtcttttatgacctagcttcagtgagatatgttttcatgtccctgttacattggtcatacacaccaatcctgatacaatgtggaagaacaccacaggaggtatgaacagtagacatttggaaccatctggaaaacttgccatgaaatcagtggaggaaagccttcagctgaccctcatttttttttttttaagacaatgtctcactctgtcacccagtctggagcgcagtggtgtgatcacagctcactgcagcctctacttcctgggatcaagtaattctcctgccccagcctccaatgtagctgggactacaggtgcatgacaccatgtctggctaatttgtttttttttaaactagagggagggttttgccatgttgcccagactagtctcaaactcctaggttcaagcagtcctttcatcttggcctccagaagtactgggattacaggcatgaaccaccatgcccagccaacttctaaactgatcaatatgggagtagcattcaatcacccacaggttaactcactctagagagaaatcttgtgagtgtaatctgtatggtaaaactttgagctcaaactttccccctaccaaaaaaaaagtatctactggggagctgcccaggtaatgcagtagctgtaggaaagccttcagtgatggcttcagggagtcacatgacaactcacaataaggggaaaccctgtgtgtggcatcaaaaatggaaaaccaggggacactcattccttaagtcacatttcggagatcatacaacagaggaatatgttgagtatacacagtgttgaaaagcctgtgacacaaacagtcatattaccaagcacaagacagtatagtttggtatgctataaaagccttgaatattctctccatttttaagaagtgagattcatactagaaaaaccattgaattccatcagtattagaatgtcatttttccacatttttaggaacctaactcagtgtaagataacaatttatacaatttattttttgagacagggtttcatctgtgcccaggctgtagtgcagtggtgcaatcttggcttattgtaacctctgcctcccaggcttaagggatcctcccacctcagcctcccaagtagctgggactgtaggcatgcaccaccatgcctgtctagtttttgtaaagatggggattcaccatgtttcccaggctgctctcaaactcctgggctcaagtgatccacctgcctcagcctcccaaaatgctgggaatacaggaacgagctaccactctcagccagaacttcttaagataaaggatgagggaatgttttcagtgatacctcttatattaggaaaaatatgtaaatgttccttggatgcaatactcacgagtgtattaatttcagaaaaattttcagtgattcctccctttatgcatgagagaattcatttagaggaagccctaggaacgtaatcaatgttaggatgcctcatctcttaactgagtggccacgcagtaacttagaacaaaaggtgtaagtgctatgaatgtggaattaccttcatcaatgtctcatttgtaggttgggccactagctcgttcattttcagtcttttaatataaacatttatggctatagtggtcctgaaaatcttactacctcgttttatatacagtgtatttattataattctaaaacatcaatacaccaaatattcagaaaggtatttccaaacagctcctgagtgatctagtttgttataatagaaattagacatttgccaggtgtggtggctcacacctataaacctagcattttgggaggctgaggcgggcagatcaccggaggtaaggagcttgagaccagcctggccaacatggtgaaaccccgcttctactaaaaaatacaaaaattagccgggtgtggtggcaggcatctataatcccagctactcaagaggctgaggaaggagaatcacttgaacccgggaaatggaggttgcagtgagccaagatcatgccacttcactccagcctgggcaaaagagtgcaactctgtctcaaaaaaaaaaaaatcagacaatatttgatatatttttttctaatttaatagtattttgccagagtacatggactttgtgattttggttgttttctctttgtgtcctaatatagcaaatactgtttctttttttttttttttttttttttgagacggagtcttgctctgttgtccaggctagaatgcagtggcgcgattgtggctcactgcaagctctgcctcccagattcacgccatcctcctgcctcagcctcccgagtagctgggactacaggtgcccatcaccatgcccggctaatttttcatatttttagtagaaatggggtttcactgtgttagccagtatggtctcaatctcctgacctcgtgatccacctgcctcggcctcccaaagcactgggattacaggcgtgagccaccatgcccggcacaaatactgtttcttaatgttcattctccctacttaaagaaaaagataagttgtcaatgagcagtattgaaaatgtacagtggggccaggcgccatggctcatgcctgtaatcccagcactttgggaggccgaggcaggcggaccacctgaggtcaggagttcaagactagcttggccaacgtggtgaaacctcgtctctactaaaaaaaatacaaaaattagctgggcgtgatgacaggtgcctgtaatcccagctacttgggaggctgaggcaggagaatcgcttgagcctgggaagcggaggttgcagtgagccgagattgcacaaccacactccagcttgggcgacagagtgagactccatctcaaaaaaagatgtacagtgtactaggctttcctgaagcttagacaggctttatcccactctgctggctaaaagaagtaggaataacgcactgggtgagacaccgtctggcttattctcatctattttcttttcattcttttggaaagtggacacaaagcatagagttaaaagagcttttttttttttttttttttttttcttcactgtggtgataaaaaccacagtgcaggggctgggcgtggtggctcacgcctgtaatcccaccactttgggaggccaaggcaggcggatcacctgaggtggggagttcgagaccagcctgatcaacatggagaaaacctgtctctcctaaaaatacaaaattaaccgagcatgttggcgcatgcctgtaatctcagctacttggaaggctgaggcaggagaattgcttcaaactgggcagaggttgcagtgagccaaggttgacccactgcactccagcctgggcaacaagagcaaaactccatctcaaaaaaaaaaaaaaagaaagaaacagtgccgaaaaatcacaatgatttgagttcttcaaaaacctttgattggctgcattggctctgttctgcatattactagacttcttacatgatcacaagtaaccactaattggttaaaaccaaagagagagagagagagagtgtgtgtgtgtgtgtgtgtgtttggttggggggtgttgtgttagcttccaggtgaatgcattatctgttaatcctgtttattgatctgtttttataagtgctccatgattctctgaaaacagtatactatgtatctaatttttggatacaggatggacatacgtactcaaactgtgtttttcaatttgtactgtatttgtttctctcgacctgacttagtgatagaggtatattaaagtcttccactagcatggtagattaacaaattctttctgtaattctgtcatttttactttatatatgtttatgtgtaatgtaactaggtgcgtagaggtttagatattctcctgtgaatttatttattttcagtaggggccataccttttcataccaaataattgtaatatgaaaatatattaacaaaaagagatcaaacatttcgctagcccatcctatagaccaggcgctcttcaaagtgccttataaatattaactgcgtcctcactataagcttgcaaactgtgctattactgtctccaacttacagatgggaaaactggcatggaaatgtctaggttgcttgcctgagttcaccagctagtaagtggtagagcacagattggaatccagacaggtgattctcataaccactagcctgttcattgagtacattccatgtggctaagcactgtttgagatgccatgtctagagcagtgaatgaaactcaagttttgccattgaggcacttacatcctaacggggaggggtgaattatagaaaaatcaacaacatggccgggcgctgtgactcacgcctgtaattccaatactttgggaggctggggcagatcatgaggtcaggagtttgagaccggcctgaccaacatggtgaaacgccatctctactaaaaatacaaaaaaattagctgggtgtggtggtgcgctcagctaatcaggaggctgaggcaggagaatcgcttcatcctgggaggtggaggttgcaatgagccgagatcgcgccactgcactccagcctgggcaacagagcaagactccatcgaaaaagaaaaatcaacaatattcatgttgtgcagaaaaataaagcattgtgagagagttacggagggctggggactttccattttatgtagcataggaaggaaaaggcccccagttaaggtgcatttgaggagagactattgagtaggaacttgtggcaagaggactgttggcatgcaaagacccacagcacagaggccagtatgactcaggtaaaatagggattcagggattagagggtaatcggagatgcagatcctgatcttgtggggttttataggtcattgttagggcttttccttacatgttcaggaagttggaatatcaagagtcccagcaggaaacagttgacacacacgtcaactgggatgattcaagcgcagtttatatcaaggggctcctcacagaattgtgaacaggatgtagggaaaccacaaaaggtacttgaaatggaacatcggtcttctccccacctcagatacgggtgcttctggttctccagccttcagactcagactcgcaacttacaccattggccctcctggttctcaagcctttggacttcacactggggtttacactgttggctcccctgttttcaggtctttgagcttggactggagcaagactaccagctttcttggttctccagcttccaaacaaatggcagatcgtaggacacccataagcctgaagggacaaaggaagagaactgcaagttgttgttcaagcgaggagagggctgcattccaggagctgacaggaggtcagtgaggggcaacatccagcctcgagttctgcaagaaatagtaagggtcggccaggcacagtggctcacacctataattctggcactttgggaggccgaggtgggtggatcacttgagatcaggagttcaagaccagcctggccaacatgatgaaacccattctctactgaaaatacaaaaactagccgggtgtggtggcatgcgcctgtagtcccagctattcaggaggctgaggcaggagaattgcttgaacccggtaggtggaggttgcaatgagccaagatcatgccattgcactccagcctgggtgacagagtgaaactccatccccacccccccaccaccaccaaaaaagagaaagaaatagccagggccagccctccttgtccttcattcttcttatatcatatttgggttccccatttgccaaactcaaccaaaagccaataaggtaagggagttcgttgatagcattcatagtaactaatcatcccaagtacagcagggtagaggaggtgaatctgctggggcgaatggaagatacccagtattggtcactccttttgcttctcagaatctactcatgcccatcacctggatggaaagttcatatccaagcccaggaattctatcagttgctcagctaccctggggtggtgtccatgcactgatactccccgatgaagcctaacatagttgccaacaccagtgtttcctgtataggatgaggaacagagccattggggaggaaagcaaaagaaataattaacctggccaggcgcagtggcttacccctgtaatcccagcactttgggaggccgaggtcggtggatcacgaggtcaggagtttgagaccagcctggccaacatggtgaaaccccgtctctactaaaaatacaaaattagccaggcacagtggtgggcgcctgtaatcccagctactcaggaggctgaggcaggagaatctcttgaacccgggaggcggagattgcagtgagccgagatcatgccactgcactctagcctgggtgacagagtaagacttcatctaaaaaaaaagaaaaaagagaagtaacctaaaggacttggttcccagagggaaacacttccaccaagagacacagtaagagtctcatcggatgttaaactgtgacttctatgagaccagcacacaaggaaagaagtcaccatactgacttaggtaattaatgctatcatccatagaatctgaggctgctgttacatgatgagtgcagggaggaaaacatttggcattcacggaatccattgggatgtctcttactattctttccccaattttaaagataaaaaaattttggccaggcgtggtgggtcacgcttgtaatcccagcactttgggaggccgaggtgggcacatcacaaggtcaggagatcgagaccagcctggctaacatggtgaaaccctgtctctacaaaaaatacaaaaaaattaactgggcgcgttggcaggcgcctgtagtcccagctacttgggaggctgacgcaggagaatggcgtgaacccaggaggcggagcttgcagtgagccgagatcgcgccactgcactccagcctgggcaacagagcgagactctgtctccaaaaaagaaaaagataaaaaaatttcaccagctatgtcctgagaagggcatggtgaagaccccgtaggcataaggatctggagcagctctccaggtaagccacctagaccagcaggatctaggtgagaaggaaatctagaattttcaccctagtcaagggtaaagggaatctggaaggtgcaagtaaaggagtgtgataagcatcaattgcatctctgagacttgttcaggtggaaagggctgtctacagtttgtcccactgatcttcctcttgtcagtttctccaggcaacgggaccaacctggatcctgagggcacttactttaagaatcctggggccgggcacagtggctcacgcctgtaatcccaacactttgggaggcagaggcgggcagatcacttgaggttaggagttcgagaccagcttagccaacatggtgaaacctcatttctactaaaaatacaaaaaatagctgagtatggtggcacatgcctatagtcccagctactccagaggctgaggcaggagaatcacttgaactcaggaggcagaggttgcagtgagccaagatggtaccactgcactccagcctgggcaacagagggagactctgtctcaaaaacaaaacaaacaaaatgaatgcagggcatctgagtggcacacatggtggaccacagtaggtacagtggtggcactacccagcaaaagagctcttcacccaatgtgctagaagccaatactatgacatcagatttttgagaaaaggaaaggtttgtattgcaagttaacaaggagacaggagtccagctcaaatttgtcttatgctgactttaaggcaataattttcttagaaaaggtgtagggcgtggattctgggattagcaggcgattggtgggaggaaaggtctgttaagtcctcaggcaggtgcaatgatctcttcatgcctccccatgggttccatgtgcaaagtcatactaactcaagggagtttgtatgaaacacgtggaaatttgcactgtgacatcagcaagctcattctgcacaaactccatttggccatgtgggttctcacagattttaggcagttttgttacaagtggaggcagtttcagcgttttagcaagttatttctttttttacctgccatcctgcaaactcaatgagaggtgaagccagctggacttcctgggtcgagtggggacttggagaactttcctgttttacaagaggattgtaaaacacaccaatcagcactctgtagctaggattgtaaaccgcaccagtgagcgctctgtagctagcaagaagattgtaaaatgcaccaatcaacagtctgtaaaacacaccaatcagcaagatcctgaaagcagccaattgcagggaggattgaaaaaagggcactctgataggacagaaacagaacatgggaggggtcaataagggaataaacgctggccactccagccagcagcggcaaccagctcgggtccccttccaagctgtggaagctttgttcttttgctcttcacagtaatccttgctaccgctcactctttgggtctgtgccatctttaagagtgaaggtctgtggcttctttcttgaagtcagcgagaccacgaacccaccagaaggaaccagcttccaacacatcaagaatttctgctagtctttgctttaacactttaggcatggtttcagtggcatatttcccagattcttcctttaagactaaggcactaaggccaggcgtggtgactcacgcctgtaatcccaacactttgggaggctgaggcaggtggatcacgaggtcaagagatcaagaccatcctggccaacatggtgcaaccccgtctctactaaaactacaaaaattagctgggcgtacctgtaatcccagcactttgggaggccaaggccggcggatcacgaggtcaggagatagagaccatcctggctaacacggtgaaaccccatctctactaaaaatacaaaaaattagccaggcatggtggcgggcacctgtagtcccagctactcgagaggctgaggcaggagagtggcgtgaacctggaaggcggagcttgcagtgagccgagatggcgccactgcactccagcctgggcgacaaagactccatctcaaaaaaaaaaaaaaaaattagctgggcgtggtggcgtgtgcctgtagtcccagctactcaggaggctgaggctggagaatcgcttgaacctgggaggcggaggttgcagtgagccaagatcttgccactgcacgccagcctggtgacaaagcaagactccatctagaaaaaagaaaagactaaggcactcccctagctgctggaggtgttgcctgatgatggtgatgctgctgtcctctctgggaactccccaaggcccagaggaaagtgcccaacccaagattatgctctctctccaggggttgcctacttccagtgactggttgatgtagggggtacaaaggtccagtgcctttgtttcaatgtaggacacccctgaagggcaaccccagcaccagaactccctgtgggatcgacggcagcctcagttgacaagttacatgtcagcctcatctgtcccctccgcttctcgcatgcctttaaagatgttgttcccaggagttttatccaataaacaaaaaattgccagcacaaaatctgttcccagaaaacctgatccgagataagatcactctatcagggtaaagaatccattcagggccggtctcaggagatcgagaccatcctggctaacacagtgaaaccctgtctgtactaaaaatacaaaaaattagccgggcgtggtggcgggcgcctgtagtcccagctactcaggaggctgaggcaggagaatggcgtgaacccgggaggcagagctttcagtgagccgagatcgcgccgctgcactccagcctgggcgacagagtgagactccatcccaaaaaaaaataaaaataaaaatccattcagataagggactggcagagagaaagcagaatgtggaatggatgtggaagaattaaattcagtcctgaagaccaggtcccaaagcaggaatagaagacagctatgctttgggtttgggttttttaaaaaatctttaattttttccgctttttccctggttccccaccaccaccatcaccattttatatgaagagtcctggttgtggccaaagcttaaggtttctgatgggaatacgaccaaatgacattatcccaacagtagcttcctttgtatctctttttttttttttttttttttgagatggagtctcactctgtcacacaggctggagtgcaatggtgccatctctgctcactacaacctccgcctcctggattcaagcgactctcctgcttcagcctcccgagtagctgggactacaggcacacgccagcacacccggctaatttttgtatttttagtagagatggggtttcactatgttggccaggctggtcttgaattcttgaccttgtgatccgcccacctcggcctcccaaagtgctaggattacaggcgggagccaccgcgcccggccccctttgtatcttatgtagggacatgaacttagcgccaagtgaaggacaagaattgatatccaaaatccaatagatttttcttttaaatacctgaaagtgaaactggcccaattttcccatattgctgatgtttatggtttccttgaataaacaaacaaattgatcttcccaatcttaaaacttaagaaagttacatttatcttatctgagttcctttctcaggaaaccaaccatcaggcctcccagatagtatctaggagctgaaacgcaccagaatactgcatttgtacagtgagacatcagacccatcacccatcatgattgcctaactgaccacctgcttcctgttgaccaactcctcttccttacccttccctaattcctgtattcccacacatggtaacatttcttccctgctatataaacctcaaattttagttggtcagggagatggatttgagattgttctcccacctcctcagctgcagcagctgattaaagccttcttccttggcaatactcattgtctcagcgataggctttctgtgcagtggtgagcagcaggacctagattgaacccctggtgtttcagcaacaacatagttcatcaccagcagaactgcacttcaagaaacactaaagaaagttttgggccagacacggtggctcacacctgtaatcccagcattttgggaggctgaggcaggtggatcacctgaggtcaggagttcgagacaaggctggccaacatggcaaaaccccatctctgctaaaactacaaaaaaaaaaaaaaattagctgggcgtagtggcggtcgcctataatcccagctacttgggaggctgaggcaggagaattgcttgaacccaggaggtggaggttgcagtgagctgagatcgcaccgttgctttccagcctgggcgatggagcgagactctgtctcaaaaaaaaaaaagaaggaaggagggagggagggaaggaaggaaggaaggaaggagaaggaaagaaagaaggaaagttttggggctggaggaaaattattccatgtggaagcaattccagaaatatataaggataatcaggaaagataaaatgtgagcaaatacaaataaatattgactgtataaatcaagcctgtatagttttaacacttttatacgtctaaatctttttttttttttcagacggagtctcactctgttgcccacactcacctcactgcaacttccgcctcctgggttcaagcaattctcttgcctcagcctccaagtagctgcaactacaggtgtgcaccaccacgcccagctaatttttgtatttttagtagagatggggtttcgccatggtgaccaggctggtctcaaactcctgacctcaagtgatccatctgccttggcctcccaaaagtgttaggattataggcgtgagccaacgtgcccagccctaattttttttttttttcaaataaaaagagttttaaatcacattgaactggtcccttaaaactagagataatagaaagcatggcaagccatttcccagtccccctaagactagagattatggaagccccagcaagtgattctcacaatctgcatacagcagtagagctgacagaagccctagcaggtaaccaccagtcaccctcaaaacaagaggcaacaggatgccagatctccacccctcaatcacttacaaacacaaaagatggagtccaaacatgaagacctccgtcatcgcgaaactactccagcaagcacccctcagtcacgtccaaaactataacagaagtccctgaaatgaccccttcagatgcccctcaacactaaagaatggggactccaagcccaatggcctacccagtctataccaacagtacaggcaagcggagacccagaatatgaccctccccaactagagataagtggaaccccatccaataatccctccatcctctccccaaacaatacacagtaaggcctctatctgataaatgctcttgacccttcaacactagaaaaaaatggaagccccaggcactggccctccagttacctccaacatcagagacaatgaaagcttcgccaagtgattccccgtatcgctcctacattaatgatggaaactccaaaaaccaatcaaccctcaatcctctacacactcaagaaaggaactccaggctgggtatggtggctcacgcctgtaatcccagcactttgggaggccaaggcgggtggatcacgagatcaggagttcgagaccagcctgaccaatatggtgaaaccgtctctactaaaaatacaaaaattagccgggcgtggtgacacgtgcctgtagtcctagctactcaggagactgaggcaggagaatctcttgaacccgggaggcagagtttgcagtgagccaagatcacaccactgcgctcaagcctgggagacagagcaagattctgtctcaaaaaaaaaaaaaaaaaaaaaaagaactccagcaaatgccaccattcttacccactaccgctgcaacatgcatcccttgtcttcccaagactataaataagtatccccagcaatgacacccaaaacaagcaatggtcagaatctcaacaggcagccccccagattctacaacataagtgacaaactcataccccagaaaactatctctcttcccattatcccaaagtaagagttaatagaagcatcagcaagcaacacccttaacataaacgaggaggggagcccagaatgcaaatcccgtctcccccaacatgagttgactgcccctgcggtgacccctcctttatcccaaacacaaggaataatcttagccccagcaggcaactcctgcagcctccccttgcaatatgagtatctctaccctcacaatatagattgatagagccctatcaagccaagtgtcccctgctaggggaatgttgggtactccagtctcagaacatggaagacgatggtagtcctgacaagctggcaaatactctaagctcccataatacaggaggtgatacagcccagcaagcaaaccttccaacatttcctgcacccagcagacccttatcagctgcattcccagttgactctcagagcatctcctgctcgctcactagaagcaaagaaagactagagttgggggtaaggctgagaggaagagagaggggagaagggtaaaagaaagagaagagggggaaaggagaccttccaagttgttctaaacccggccatgaattccagatgcctcaaacagctacaatcagatcaggcactccagcacaaaaaaagagattccgggctgatgaaaagaggtggtctgaaggaaaggtgggtgtgttgactagccttcagaatgctcaccaaagacccttgccacctgatattcctgtcctgtgtaccccacctccaatattgaatcatacacgacccatatgatcaatacagcactgttgcatgtgacatctgaggctaggtcataagacacactgaagcttcctccttggtctcttctattgctctttctctaggagaagccatccgccatgccatgaggagactcaagcagccccgtaaccagtaaccaactcaccagcaccacattgctagccaggggatgagccaccttagatcttccagccccaaattttgaactctaattaatgatatgtaagctatctgcaacctacttcaaaatgcatttaaaaagatgaattgatggatgatacagagatgtatatgacaaagtatagtaaaatgttactgatgaatgttcctgtacattttttcaaaaattatttccatgcttgaacattgctcataataatttgttagtattcaagaactcctacgaagcagtaagagaaagaccaagagttaattagagaaaggagcaaatgctaacaacagttcacagaaatacaagtggctctcctaagaaaaatgggaagtaatacattgagattccctttttcattgatcaggaatttttttcttttaaaaagataacagattgaccaggatgtggagacactggcacctccatatcataatgacgggaactcaattagtgcaactcccccggactaagacaaggacccaaccagacccagagccacgccgagcccagggtgccatggggagacgcggaaagagccgaactgaagcggcgaaatcggagaaaactgaagccgggcggagaaagccgaactgaacgaactgagccgaggagcggcggagaagccaaggctgggcgaggggagccaaagacgggtggtgggagccgaggtcggccgagaggaaccggaaaagccaaggccaatgggaggagccgaggccaggcgggaggagccgagcagggccgaaaagcagcgggaagggcggcggagaagccgagccatggccaggacggagggaggggaagtttcaggtcggagacagagagggacaggcagcgccatggtaggacgccaggcgaggacggatggggaagccgaagctgggcggaaagagccgaagccaggcgcgaaggaagccgaagctgggcgggggaagccgaggctcggcggaagagccgaggccgggcgggaggatccgagctggaccgaaaagcggtggcactggcgccaagcgcgggaggtcgcggggcagagagggcgaagggagggtagcacctggggtgagggcgggcgggagagtcgagctgggcagaaagagcggaagccgagagcaagtgcggggttgagggcgggcgaaccgaggcagggccctggaagccgaggtccagcgggtggcggagagggtaaccgaggctgcgtgggaggagccgaggtcgggtgggagaagtcgaagccccggtcgaaggagctgatgccaagtgggaggagccagtgccgggtgggaggagctaagcgggcgaaaagcgctgaggttgagccgggacccatcttcttgggagcaggggaagggaggtcaggggactgcagtggggaaggggccgtggatggttgagcccgaagctgtcaacatggccagagtcatctgcagggcctcaaactgcctctgcaaaaattaataacagtgagaaaattatgacagtgaaagacacctgacccactccatctcgcctttaacctccaaactctcctcggtcattcctaggtgtgggccaagctaaccttgggagaaatttagttacagtttaaataacaatagcctttcctaaaactaaaccgccttataaaaataagagatcaccaagttatgattagagcagggcctgaattctgctcagatgtagacttcgttaaggattaccagcccttgctcaggtgatcacaagatttgtaacccttccaattactcctgtaaataacatcactattgtagaagctaagattggccttttgagatgtcatttaagacttttgggccaggcacagtggttcatgcctgtaatcccaccactttgggaggccgaggcgggtggatcacctgaggtcaggagtttgagactagcctggccaacatggtgaaaccccatctctactaaaaatacaaaattagccaggcatggtgatgcatgcctgtaatcccagctactcaggaggctgaggcacgagaatcgcttaaacctgggaggcggaggttgcagtgagccaagactgcgccactgcacttcagcctgggcaacagagcaagagactgttggggaccagcctcaacaccacccgtagggtactctaagtccggtggcgtcaaaggattgagaagagacaagttaaaggtggggagccaggggggccagatgcgaggtaggaggcggcaaaaggctcagagctctggtctccacactattgagtacaatcacttagatctgagaagcagatgttcagggcaaaacagtgaaagggaggcagtgcgtcatacgcgtaatctatagcaatagtggtttaaatgattctccgttgtgctcaaacaacatatctttaacttatcggagagtagctagtgggagcaggctttactaggagcctgcacgtctgtccacattccagtgtttcaaaggagtgtctttctccttgaacacagtgtttacagataagagagcaggtctcgctctgagcatgtgaacatgatggcaattaggaggctttcctcctcagaagccttttgtggctttccacaacttattgtcccatatttttatggccagtttatacaggcaccccacaagcccttttcccaacagagactctgtctaaataaataaataaataaataaataaataaataaataaataaagacttttgcatttctgacgaccggatgattcctgtggcccccacccagaaacaaactcagcacacaaggactgtttatttccacgcatcctggaccaattaacagcacctgttccctgcctccctgcccacgaaactatctttaaaaaaccctagcctccaaattttcaggttccccatttagccggccgtgcattttgtttgtttgtttgtattttctgagacggagtctcgctctgtcgcccaggctggagtgcagtggtgcaatctcggctcactgccagctccgcctcccggcttcatgacattctcctgcctcagcctcccgagtagctgggattacaggcgcccaccaccaagcccggctaattttttgtatttttagtagagacagggtttcgccgtgttagccaggatggtctcgatctcctgacctcatgatccgcccgcctcggcctcccaaagttctgggattacaggcgtgagccactgtgcccggccaatgtgcatgttttgaattctttctctattccaattctcctgccttgataaatcagctctatattgatgagtaagatgaacttctccggtggtttcaggtcctcctgccctcccggtcctgttgctccggccctgccaccgtcccctgcgagggctgctccatcggcaacagctgcatgttctctgcccccagtgaatgctcattggtgatatttgcatagggacaccccatcggcctgacagacagtttctctgaactgcgctgagacctggcccctcacctgtttatcctcacattggaattctgttttggtgtttgctttttggaggacttgcatgataacactgttttacgaatgaggaaactgaaacacgaaggcacagaggggttaagtaacttacctaaggttacgcagctggtaagggatttaaatgggatagtctcactgcagaatcagtacccttaaccatcgcgctatgagcgaaagagacaatgagagaaccaaatcaagataaaaaagaacatccttatcttgattttgtggtctccctgaactttttttttttttaatttgagacagagtttctctcttgttgtctaggctggagtgcagtggcgccatctcagctcactgcaacctccacctcctggattcaagcgattctcctgcctcagccttccaagtagctggggttacaggcaagcgccaccatgcctggctaatttttgtattttttagtagagacagggtttcaacatgttggccaggatggtctcgaactcgtgacctcaggtgatccacctgcctcaccctcccaaagtgctgggattataggcatgagccaccgtgcctagcctccctggcctctttcaatgaggagtttctaatactttcatccgtttttcccacggctgacacatctagagtgccgttctttttttatttcaaaatatgccctgaagatggcagtattgcaccaccctaaatccacaagctcttttccaaatgtttgccctgatgtccatcttctgaaaacaataatcaccaattagacatgtgagccaattagcattaactccttccatgaagaacaatgcaattgtctcctagagagcaactatacaatttattcactttgttttttgtttgttttgagatggagtcgtggtctgtcgcccaggctggagtgcagtggcgtgatctcagctcactgcagtctccacctccccggttcaaacaactctcctgcctcaggcccccttagtagctgggattacaggcatgtgccaccacgcccagctcttttttttttttttttttttgtatttttagtagagatggagtttctccatgttggtcaggctgatctcaaactcccgacctcaggtgatccgcccacctcggcctcccaaagtgttgggattacaggcatgagccaccgcgcccggccacaaatttttgtatttttagtagagatggggtttcaccatgttggccaggagggtctcaaacccctgacctcaggtgatccacacgcctcggcctcccaaagtgctgggattacaggcgtgagccaccgagcgtggccgtaaccaggctcaatgactttaactcttttcctcaatgattttcattcctcaatggctttaacctcttccaaatgattgcgctgatggctaacatatgtctgtcttctgaaaacaataatcaccaattaaacatgtgagccaattagcatttactccttccattaagaacaatacattggtctcctagaatgcaatttacaattactcactttgaacaagggaaatctcttcaactccacagacaagggagccactccctttctgatcacagattacagtgagcaatggaagtttcataatcgatggccttcactttcttctctggaatgtaaagttgactcagctgggaagaagcccataagaaaaaaagatcaatatgagacaaggagacttgtctgcagtatggcaggctaattatcttgaaaaacagtcctactacacaacatttaaaaagatgaatacacacctgtaatcccagcactttgggaggccaaggtgggctgatcacttgaggtcagcagtttgagaccagcctggccaacatggcaaaaccctgtctctgctaaaaattaaacaaaattagccgggcttggtggcacatgccagtagtcccagctactcgggaggctgaggcaggagaatcgcttgaacccaggaggcagagattgcaatgagccgagatcgtgccactgcactccaacctgggcaacaagggcgagactccatctcaaaaacaaaaaaagaatacaaggccgggtgcggtggctcatgcctgtaatcccagcactttgggaggccaaggcgggcagatcacctgaggtcgggagttcgagaccagcctgcccatcatggagaaaccttgtctctattgaaaataaaaaattagccgggcatggtggcacatgcctgtaatcccacctacttgggaggctgaggcaggagaatcacttgaacccaggaggcggaggtttcagtgagctgagattgctccattgcactccagcctgggcaacaagagcgaaactctatctcaaaagcaaacaaacaaaaatactccccagaaaaaccctatttccaaataaggccacattctgaggtcctggggactaagagttcaatatattggggttgcacagttgaattcatctcattgtttaggcacggggaccaacctgtcataccccatcaaccatcaaatgcggctgctctctgggaagggggaataaccttggacaaaatagctcccttaagcctgggaaagttccagaagagggactcagttgtccgcccccagaagacaactttcctggaagttggaagagtgagcacttggttctgaagaggtgatctgggtggtgcatgacagcatccacgacagtggatgtgccgtggctcttgctgcatccactacagcatccactacagcatccgctacctccacctcaatatccactacctccactacagcatccactacctccactacagcatctgctacctccactacagcatcatggatccaccacagcaatcaccacatccactacagcatccactacagaatccactacagtgactccaacacagtggcctcccactcctggggttatgcttcaggaaatgggtcagcaacctctaaggagcctggagatcaacagttgagaacattagaccatggactcatagtctaaaccacccaccaactatgtcagccctattaaaattatggcttccctcttttgtgaagtactttgaagatgttttctctcacttgtgtactatcctgatgaccactgtctcatctgtggtcatgcagaacacacatggagcagagccaaggccagaatttgcatttcctggctcccaagtctgactgtctcagcaacccacatccccattctaacccagagcccagccagagttcctcctctggttgtgaggctgtggtctatgaaaccaaagcctgtgccttgctttctcagcctgtcagggtcttaccactggataggagccttggatgaaaggacaggcagacagataaattgatggacagacaagaagagggatagatgatggatggatggatgaatggatggatggatggataggtggatggataaatggatggatgggtggatgaatggacaggtaggtggatagatgatgaatggatagacaagatggatatacagacaaatgggtgggtggatggatagaaaggaaggaaagaaggacagatagatggatgggtggatgaagagaaggcaatagacaaacatataggaaattacaaatacagatagataaaaaaaaaaaaggccccaagagaagtagaggtagaaacagaatggtagaaaagggggaggaggtcagagatatgagtgggaggaggaaggtgaaatgagagagaaagaaaagcaaagcccaaattatagtgtgacaggaagattgggtagcagaaatacacaagcaaaaaaagagaaacaagtgagaccaaaactggagaaataactcagagagagtgaccaagaaggagagaaactaaggaacacacacaagggaagcaaagggagagaagaaaaataagacaagagtgggaggaggagagggggaaatagagaaaaaaatgggaagacagaaaagtcctacatagaaggaaagacagagggaaagatggggtaaggagatacagaagtaatgtataaaagaaataaagtaggtcaggcgcacctgtggtcaggagttcgagaccagcctggccaacatggtgaaactccgtctctactaaaaatataaacaattagctgggcatagtggcaggtgcctgtaatcccagctactcagaaggccgaggcaggagaatcacttgaaccctggagggggaggttgcagtaagctgagattgtgccattgcactccagcctgagcaacaagagtgaaactctgtctcaaaaaaaaaaaaaaaaaaaagaaagaaagaaaaagaaagaaagaaagaaagtgagggaaccatggtgggtgcaagaggggagtagatggtgaggatggagagagaagggaaaaaaagaggagaagcacaaatgaagagaggcagaaacatggctgaccacaaagggaagcacacagaaggagaaagattaagagaataggagaaaagagcagaaggcagatacagaaaaagatggaggagaggatgaagcagacttgaaataaataaaacagagataaaagagtggcaagaagtagaaagtaggacagaaacaaggagggagcagggtgatgaagaaacaatcaagcaaacaaaaaaaaatcaaaacacaaggagaaacagtgagataaatacagagagaggaagggaattaaggggagaagtgaaaaggggaagccagggtggaggcagcaaagaagaggcccacactgaacaagatacaggaaagagagcagggaagagggaaagagaagaaagagaagtatttctttcttctagaagggtggaagaaggaggcagagatccaagggtagtagccagcactggaaatgatcctgaggcatcagataatgatgaagataatgatggtgatgataagaatggccatgatggcgatgatagtgatggtaatgagggtgatggtgatgagatggtgatgatgatgatggtgatgaagatggtaaggatggtgatgatgatgatggtgatggtgataggatggtgatgatggtgatggagatggtgatgatggagataatgatgatggtatagtgatggtgatggtgatggtgatgatgatggtgatgatggtgatgattatgatggtgatgatggtgatgatggtgatggtaatgatgatggtgaagatggtatggtgatggtgataatggtggtgatgatgatgatggtgatgatggtggcgatggtgatgatgatggtgatgaagatggtgatgatataatgatgatgagggtgatggtgacgatggtaatggtgatgaggatggtgatgatactgatgataatgatgaaggtatggtgatggtgatgatggtgatagtggtgatgatgttaatgatgatggtgatgatgacagtgatggagatgatgatgacgctataatgatgatgagggtgatgatggtaatgaagatggtgatgatggtgatgatagtgatgatgatgatggcagtgctgatgatggtgatgatgacagtgatggagatggtgatgatgatataatgataagggtgatgatggcgatggtgatgaggatggtgacggtgatgatagtgatgatgatgatgatggtatggtgacgatggtgatgaccgtgataatgatggtgatgatgatgatgacagtgatggatatggtgatgataatataatgatgatgagggtgatggtgatgatggtgaaggtgatgaggatggtgatgatggtgatgatggtgatgatactgatgatgatggtatggtgatgatggtgatgatactgacgatgatggtgatgacggtgataatgatgatggtgatgctgatgacagtgatggagatggtaatgatgatataatgatgagggtgatggtgatcacgatcatgatggtgatgatgatgatgatggtgataattatgatggtgatgatgttaatgctggtggaagcaacagctgacacatactaagtgcttactgtgtgccaggcaacttcttttaactgaggtataatttacatacaataaaagggataggttttaagcgtacagctcagtgaactgataaatgcatatacccatgtatttgctacctcagtcaaggtacagaacatgtccatcaccccagaaagttcccatgtacccctttcacaaccaagatcccgttacccccaccataggaaacccatgatctggtttctgtcaccatcaattactttagccatgccctgtgtaagtgctttacacacaccacaaatttattttatatcccgcaacacccgtaaggagcagggaccactgtcatccccatacacagggagattcgtacaactaatcataggagagccatggttcaaaatgaggcagagggcttccgggagctgacttgagccactaagacaaatataatattttgggggtcaggtgaagtaacctttccctctcaccctcttagagtctctgactgggactgacataagacagattaacaagataaatatacacatttcatttagttgaggatttttgtttagttttggggacagtgtctcactttgtcgcccaggctggaggacagtggcacaatcatagctcactgcagcctgcaattcctgggctcaaggagtcctcccacttcagtcctctgagcagctgggactacaggtgtgcaccactgtgcctggctaatttgtaaaatttttcgtagagatagggtctctctatgttgcccaggctggtcgtgaactcctggcctcaagtgatcctcctgccctgacctcccaaagtggtagaattacaggcctgggtcactatgcctggtctttatttagtaatttttacatgtgcaggggagattttgtaagaaaaacgaagacctaaagaagcagttggagctgaatgcttatgtactaggttggacaaaatatagtatggtagtttcatctcctgctttcaggaagaaaaaggaaagtcagagtgtccttcttgtttgctatttttcaagcacctttaactcaaaataaccaatgtgccaaagtggcatactttgttgttgtgaagtgttttttttttttttagacagagtctcgctctgtcatccaggcttgagtgcagtggcgtgatctcggctcactgcaacctccgcctcccgggttcaagtgattctcctgcctcctcctgagttcaagcgattctcctgcctcagcctcccaagtagctgggattacaggtgtgcaccaccacacccagctaatatttgtatttttattagagacagggtttcaccatgttggcctggctggtctcgaactcctgaccgcaggtgatccgcctgccttggcctcccaaagtgctgggattacaggtgtgagccactgtgcccggccaaaagtggcatactttggagtggcatatttggatcccttacacaggcaaaggcagaatggaagcaaagttcccgtgttcttgtcctgagtcagctgagtccagtgggggaaggggaagttgttaaaatgcaagttcccaggccctgccccatagatgctcatggaggaggcctgggtgtggcttagacagacacacctttgtttttaataagtgggattctgataagcacccaaggcccaggaggaagctccaggaacccagtgcagacactccccactccaggccagggcgccagctaccctgctaaaaggtgctgtgatcacttggccagggctttcaaggaatccaagtggctcctctgcacagagaccacacggccgtccaccctccctgagactgatgccttccttgatgagctttccttggaagaaaaacattttccattttccaagagactcacattgaatttcacaaacccagggaagcagaatttacgctgccaccacagccgataagcagtagcatcaatttcttggagaacagggaacttggagggacttggggatatgggaatgtccatcctgaagggagcatgagagatcaatgttacctcatttaatctttgccatggtcatataaggtaaggtctatcgtcaataataggagggtagggcctctgtgggccatgatcagcctgctagctggatggcagagaactgggagcagaaaggaggaggggagagagctggaatgaccattgggattccagagcccagggttaggaccaccgccctttgtaaaaccagccacttagccagttagttgctttgtgtgtcttcaggctaatttaacaaccccatactgcggaactctgggccagagtttggaggaatgtgaagaattcagacgcaactttcatgcagcctctggaaagctcccaggataatggggaaacacacacattcaataacctcaactttcgatggcccagctcagaacactgccagctggaggtaggtggtctggagaaatccagagaccgcctggaggggttggggattgagttccattgcctttgggagggagagagattccacagcccacatactttgcactttagctaaggtcaacccctccacctgtgccgtagatctcatcgtcacttgtttgcttaaggacatagagctagtgatcccctgccttcatctcttttccctctgatgactggattatccctgtcatcatccatactgctatttctcccatctcaaaaacaaggaataataataataataggatggtaaagtgagaactttacctttatattattattagtagtagtagtagtagtatttttttttttatttttgagacagagtctcactctgttgcccaggctggagtacagtggcatgatctcagatcactgcaacctctgcctcccaggttcaagcgattctcctgcctcagcctcccgagtagctgggactacaggcgcccgccaccacgcccagctaatttttgtgtttttagtagagacggggtttcaccatgttggccaggtgatctcctggccaaggtctcgatctcctgaccttgtgatcggcccgcctcagcctcctaaagtgctaggattacaggcatgagccaccgcgcccggcccacttttatattattaaaaaaatataataataatgataggagggtaaaggagtggaagattattgcaggattggactctagttggttcacatcaccttttatctgcatccttggacagtcctctccaaagctgactctgggtttggccatgggacttactttgggcaatgggacagtagcaaataccacacgagcagaagtttggaaaatatttacatttgggggctttttgttccttccgactgggtatccctgcaaccaccaccatatgaacaagcctgagtgaacctcctagaagacaagcaatcctggctctcccagcagaggcctcagcacaggagtgaggctgttcccggaagaaccacccaaccaacacatagaactgtaagaaacaggccaggcaccgtggctcatgcctgcaatcccagcactttgggaggccgaggcgggcagatcgcttgagaacagtagttcgagaccagcctgggcaacatggcgaaaacccgtctctactaaaaatacaaaaataatcatcataatgataataataaggctgggtgtggtggctcacacctgtaatctcagcactttgggaggctgaggcgggcggatcacctgaggtcaggagtttgagacgagtctggccaacatgatgaaactaaaaatacaaaattagctgggaatggtggtacacgcccgtaatcccagctacttgggaggctgaggcaggagaattgcttgaacccggagacagcgttgcagtgagctgagattgcaccactgtcctccagcctgggtgacagagtgagactccatttcaaaaaacaaactaacaaaaacaaaaacaaacaaacaaaaaaagaaaataaataaacagttgctgttttaagccactcaagaaagactattcaaaaggctttcaatcccatggtctaacccatggtcactcacctgtccacccaacctgggacaggtctccactcccaggatgacattgaaaatacttaacatatgagtttcccgcatgtcagaatagagcaagatcttgaaggttcattggtattctcggagtgaaccctttagtggttggaccatggggaggtctgggagcccttggggaagcgcttacttaccaaatggtatggaaatagtgcaatatttaaaccaccagtttggccatacaagtatgtccctacgagtcatcaactctgctggtagcaactatttaacctcccttttcatgtgtggaagaatctaggtgtttttctcctctaaaaaaaggcacctacatattccaagaggttttccttaacacagcccaactcatagccacatcccccgaccacacgacaggtccttaccgggacaccacacaaaaacaagcgtattctcagataatttaatcagaattttaatataaacaggtcattatcccatattttacatgcagaacgatttcaatattccaaaaaaaaaggcgtcttctgtacatggtgctacttggctcttgtaggaaaacattgaaaaaataataattgagctgttggggggttttgtgtttctgagttgttttctgcaaaagctgcagcacatttgatcctgcgttgccaacgcacagggccgaggccacccaggcacacaaagggacgaggagaagcaactttcaggcaaagtgtaaagactaaacaagctgttcctgaatatgtgcatgggtgcacacttattttgaggctcttccttccttctccaatgggaccaagagccccagatttgtgatctggtttttaacaaggattttcagtggcccgcacccagatagaaatttggctggtggctggttctggaccttgactagtatcagaaggtaaaagtaagctcaaaaagccattgtgtcccctcccctcactcccatttctcggggacccttaaggaaatattcaccttccattgcactccctgaaagtccaccatgttcttttgtatgttctaggaaaaaaaaaagtgctgacctgttcttttcattcccaacctcacctcgcatataaattaatattctgaagaacatgctggaagattttctgaagtgacacccctctctgtgtaccatgtatataaaatcggcattccctgttccccatcctcaacaaaaccattgtttctgaagagcctaaggtgtcaaggactcaccaggtgacattcaaaggacatttaaccctaaacttccacccactgtgaaggagagaaatgattagcactgggactacagcacatccatttaccggatgaccagcgcaagtcatatgctgatgacgctcctgctctttcacacgtgttacagcagactacaaataaacacctcccaatccaataagcacatttcttggtggactacctgccctgctaggatacagtgaaagatctgtctgtcagttggtaacatagtccccagggtcacaggatgacctatgcagacccttgtgtcagttcccacagcttctctcaatcatcctcagcctatatccagacaagcagcagtgcttctctttctcactgcttccaatgatgaaacagcacctaggacagctcctaaaacctgaacattttctgatgcgtatttgacatcactgatgcagagagaaagtgatgtgcttggtattctcctcctggaagaaggaactcctgtgtggctttcactacattaatgaaaagggttttaatcatagtgagacatctttaagaacaagcaacaaaaagtgttatcctaagctggttttgttgctttttgttgttgttgttgcaacttaacactacaaactcccaggacaaccgtgtctttctaggaccaaagttttattgttacaaagtcaacatttcctaatgtcaaaggaggtttgcaacccaatagctgtttgctcttttcactgtggcagtagagtcaaataaatgaaactggtgaatcccatttgcaaggggcaggcccagcacaccctacctttctccagggcaggtggagaaaggtgagtctgcaagggcagtgcctaaaagtacaagagcagcaagatttgggccccactggtcctgcctagactctcacatgggttatcaaagctgcacaaggtccaataatatcagcttgaggtcagtcaaaccccaacacagaggtccaaggtgttgttgcaaaaaaaaaaaaaaaaaaaaaaaaagcgttcagcacattaatgggttttggattggaatttccctcacatgctcccatcccacttggagaatttaaaaagacattgcattaggtgtttgtgtgtaaggtgcatcaccagcctgaaaggagtgggcataaaccatcagggagcccagggcacctttgtgctcacttcagggggattccatggaacaggtgggaatgcttgctctgaatcaaagcccgtctttgccccggcagccatctctcaccaaaggaaggtacaccttgctgggttaccccatatatcagatacatcatgacagcctggaacttagtttatgtttggggaacatagtgacaatagatggaggatttttttttaaaggaagattaaattcagagaagaatattaccagccaggaagaaaaggatctatgctcgcataaaggccataccttctccatcccaactccctccctcaaaattcttactggtccctggcattcgaatcagctgatacacacgttccctgattcagaccggttccaggtagaattctgaaatctcaaagatgtccatgattgaatcacatcttaacaatacactgaggtagactgtgctgaaaaaagaaaatcactatcccccattcacctgtttatttttctttgataaaaatttacatgcgctccattttttatgagagtgattttcagagtgattttatatattaaaataaatactttttcccctaatataagaaaaacctttctgaattagaaaaatgtgaaaattgcagctagtgtagtatacaaccactacaaatttactaagaagagaacaaaatacctagttctacgtgttttttttttaaatttaggtacagaccctcatatttacaaaataaatttggcaaaaataatttctgtactcttgcttcttgtacccaatcactgaggctcctcagcaatatttttacatgctgtattttcccgaatcatataaataagatagcaatagacaattgggattcatgtctacctgtgttcttaatcaagaattgagagggcttggaggttgccattatgactctatcccattcttaagcccacaactcttaagagaagaagaaaaggaagcagtcaaaaagttgtaagaaaatgcactcaggaataacgcatgggcgatgattttttgatgaaccaaagtgatgagttcactgtgttctttgagcagctgtggtggttctttttgcaaagagaagaaacggtggattcacgcccattcggaagttcttggtggtgtgtaaggtctttttcacggtttctcctccagactctactctcttagggattgcaacactgtaagcacctgagcattcagctcaggcaccacacctggcccagatgaggtcaccgggctcagagcagcttccgggagttcagtactgaggaccgtcagatgctctcagggtggaggggaccaagacgtactctcagtgcacctctctcttacattgcttagatgttcccaaagtccatccaggttgttgtgctttgggatctgacgttcttgggtttgcacaataacggttaggatgttcacacccgggagaggaaacgccacaagaggtacacacagagaatcagaggatgaacacaggtgttcttgaaggcaggctcagagctaggtagctaccagcttatccgaacaggaaccttccagcagacctggtacctgaaccagaccatccataaaacctagtctctcacacactccacgtggcctcacaacatccaaaagtgttagcagcgaacatggcttcattcccagaaatggatgcctttaagaccaaacaaagaggccacttgtgcctgactccctccccttcccggccccacaacaggcagaccaactcatgtccccactccccgccaaccccggggaatagtcaataacttatgaggctaataccagagactttaaaaattaaatatggtacaaatatattctcaaaactctgtcatctcagttctttttttttttcctttttccattttgttttttctttctttttctttttttttttttaatgtcctagcttggtttggtcttgaaaagattcataatcactccaaatgaaatgctcctcccttggccaccaatgtgaagggagggtagaaacctgaggctagacttctgacacaagaagaatctgtcgagagcacagtctcccagtcaataagaaggaaggagagagggggatgagctcgcacccttgagaagaaccttcatgagccaattcccaaagcatcaactccgcatggatactttgcacacacatcagccgtgtctaatggacacacacacgtgcatacacacgtgagcacacgccgggaccacagacccttatccaaaatatgaaagcagcagctattggtcaatttgaggaactcattttgtaaagaaaaaaaaaatccttcagcctggatgagagaaaaaaaaaaaaccaaaaaaaccatcttgaagctcaacctgtaaaacttgaaattctcctggaacagggctgggtgtttttgttttgttttttctttcgaacttttgttccacaaacaggaagttttgtcttttatactgaagctcagacaccagcaaaaaaaaaaaaaaaaaaaaagaatttgtaaaaacaggtgctttctttccatctgctgggggcgggtggggggaacgaaaaaacacaaaatcctggtttgaaaccgtcgttgccccaaaggagcagcaactgtggaaaccccttgccctccaggttcacagttaaatcctctgcaggactagttaaattggtaaccaaacgagtccaccttaagatgaacagaaatgtataggaacgatctctgaactccattggacatggtagagtcgtgagaatcctgagttttccagaggctttcaaaccagaggaaagcgaaaatgggaacccctgcccgcccccgccacggtaggcactgttaggaaggattggaccgaggcaaggtcagaatccgcccgtttttcttgcctccgttcatgtgtgtgtaagggatgtgttcctcgtagctccgcttgaaacccagcgaggaccctccatcccggccccccgcctcctccctctgacagtgcgaggaacggtccaggggcacattctccatgtcctcaaactccatctccagctcctcactctcgggagccttgttctcctcgctgtggaagaacgacacctctggaaagctggggtgcaggtcgtccttgagcaggttgacaatctccaggaaggttggcctcatcttggggttgaattgccagcacatgcgcatgaggtcagtgctgcggggcagaaggacacgtcctgggtgagtctgggggccctgccacgcatcctcccaaacccccactcttgtccctgcagccgacacccacggaccacatgtgctcacatcagatgctggctgtgtgtgtggacaattgtcaaggcagaaatagcattgctagaggtgctgagagatggtgttttctttttgcttttcttcttcttattttggacacagcgtctcattctgtcacccaggctggagtgcagtggcatgatcatagctcactgcagcctctgcctcctaggctcgagcaatcctctcaccttggcctcccaagtagctgggaccacaggtgtgcaccaccatgcctagctaatttttgtattttttgcagagacagggttttgctatgttgcccaggctggcctcaaactcctaggctcaaatgatccacccaccttggcctcccaaggtgctgggattacaggtgttagccaccatgcctggccgcttttttttttttttgagacagggtttctcactttgtcacccaggatggagtgcagtggcgcaatcatagctcattgcagccttgaactcctgggctcaagccatcctcctgcctcaacctcccaaagtgctgaggttccaggcatgagccatcctgtccagcctgaaagatggttttgaaaagggattcctcatttcaaaactggctcaagagtaatcccagcactttgggaggttgagccaggaggctgagtccaggagttcaaggttgcagtgagctgtgattgtgccactgcgctctaccagcctgggtgacacagcgagacttcatctaaatatatatatatgtacatatgcatatatatttggaggggggaatatataatatgtatgcctgacaaaatttttgtgtgtctgtgtttgtttttgagacagaatctcactctgtcacccatgctgcagtgcaatggtgcagtctctgctcactgcaacctctgcctccccgattcaagcaattctcctgcctcagcctcctgagtagctgggattacaggcgcccacgaccgcgcctgggtaatttttatatttttaatagaggcggggtttcaccatgttggccaggctggtcttgaactcctgaccttaggtgatcgttcacctcggtctcccaaattgcttgggattacaggcgtgagccacccatgcccagctacctgacaaaattttaagtgtataaagaattaacaggcggctgtaatcccagcactttgggaagccaaggtgggtggatcacgaggtcaggagatcgagaccacggtgaaaccccatttctactaaaaatacaaaaaaaaaaaaaaattagccaggcgcggtggtgggtgcctgtagtcctagctactcgggaggctgaggcaagagaatggtgtgaacccgggaggcggagcttgaagtcagccgagctcgcaccactgcactccagcctgggtgacagagcaagattccgtctcaaaaaaaaaaaaaaaaaaaaaaaaattaacaggcaaacaggtctctctcccccaaccccaggtctccagttcccttctcccaagataactaccgctataggtgttttgtgcaaccttccaaagatacaatatgcaagaaaatcatatgatttgtgaacacaagcaggcaggtaaagacataatatgtaaacatgtgtgcttataatatgtaaatgaggtgtacatgtgccatgatatgctgatgcacacagaaacatataatatgcaaacataaatacctatgtaaatatataatatgcaaacgtaagcgtacatgtagcacatatgggaactcaagtgtgtgtaccacaatgcaatatgcaaatgcaagcatgcatgtaaagacaagctatgcaaacacaaacacacctgtaacatacagcatgcaaacacggtgagcgtgtagacataggaaaggcaaaaccaagcacacgtgtaaagggcaataccctttcaacgaacacctcacacaccttaaaccctttctacacttacactctctctggacagttgtcgggttgatccagataccctccatccatgacaaatttcaacacctgttcattagacaggccttggtaaggctgttctgccaagctggtgatttcccaaaggaccacgccaaaggacctgccgatgacagttgatagtagtaacaaagaagccatttagacacacacacacacgcgcgcgcgcaaacacacacacgcaaacgcacacacacacgcaaacacacatgccaacacatacatgcaaacacacacatgcaaacacacacgcacatacacgtgcacacacatgcaaatacacacaaacacgcatgcgcacacatgcacacacaaatatgcaaacacacaaacacatatacacacacaaacacacacacccaaacacacacacgcacacacatgcaaacacacacaaacacacatatgcacacacatacacacacaaacacacacacaaacacatctcttggtttctagaacatggttagccacttaataaaacaattcatgctgcagttcataaatgctgtgaaaggaaaatcaatttggggctcccaaatcactaaactcaaggaaaaagtccagctaggaactgcttggacaaacctgcttcccattctattcagagtccccactctgctcactgagatacctgcatatctgattggctcctttggagaggcgcatcagaaactcaaaagaatgcaaccatttgtctcttatctacctacaacctggaagctccctccccacttcgagttgtctcgtctttccagaccgaaccaatgttcatcttatatatgttgactgatgtctcatgtctccctaaaatgtataaaaccaaactgtgctctgaccaccttgggcacctgtcctcaggaccacctgaggctgtgccacgggcacacgtcctcaaccttggcaaaataaacttcctaaattaactgagacctgtctcagattttcggggttcacaatgcctacaggattagtcaggacataagagtagccgtgggaagatcctaagacaggacgctgccttcctttccttgatggggcgtccaggaggatggcaggcttccttcccccgctcttggctctcactagcacctggaattcaagcccagcgtccatccacccatccacacacaactcaccacatgtcagaagaagtggtgaagaccccatccttcagggactccggtgccatccaccgtacagggagcagacccttgccccctttccggtagtaatccgtttcatagatgtctctggtcattccaaagtctgacaacacaaaaggttcacacgctcttaaccttcagccttggtcctagcatctgccaccttgactgccccacctctcacagagccctaagaggggttcacctggcccacgtctgcgctcacctgggtggtggccaaatccagtaagaatggattctgagggtacgcatggggaagtgaagggggaagatgggctactgtttaaagggagggaaaagaaggtaccaaatcacaaagaagctacatttttctttttttttttctttgatatggagcctcactctgtcctccaggctggagtgcagtggtgcaatcttggctcactgcaacctctacctccctgattcaagcaattctcttgcctcagcctcctgagtagctaggattacagctgtctgccaccatgtctagctaatgttttgtattttgagtagagacagggtttcaccgtgttgaccaggctggtctcgaactcctgatctcaggtaatctacccacctcagcctcccaaagtgctgggattacaggggtgagccaccgcacctggccaggagatgtctttttgagtcataaatagaatcatatcacttcctgctgccccttgctaatgtaagataatgtcgagatgacttgctgtgacacgcaaggtccttctgggtctggtttctgcctctctcctcatcctcacatctcacgctgctctggtcccctctatattccttttttatttgttttttgaaatagcgtctcactgtcacccaggctggagtgcagtgatgctgtcacagctcactgcagcctccacctcctgggctcaagcaatcctcccaccccagcctcctgagtagctgggaccacaggtgtgcaccaccacaccccactttttaaaaaatcttttcaaggagatggagtctcactatgttgcccaggctggtctcaaactcctggactcaagcagtctttacacattggacttccaaagcactgagattacaggcgggacccccggtcctacaaacatatcttttaaagaagtgaatgggtaagtgagtttatcaatacatgcaattaaatgacagctggtggggggtccccatccaaaatcttgcccagccaggcacagtggctcatgcctgtaatcccagtgctttgggaggccaacacaggtggatcatatgaggtcaggagtttgagaccatcttggccaacacagtgaaactccgtctctactaaaaatacaaaaagtagctgggtgtggtggcgcacgcctgtaatcctagctactcaggaggctgaggcaggagaatcgcttgaacccaagaggtggaggttcagtgagccgagatcctgtcactgcactccagcctgggcgacagagcaagactccatgtcagaaaaaagaaaaaaaaaaaaagccggtgcagtggctcacgcctgtaatcccagcactttgggaggccgaggcaggaggatcacgaggtcaggagatcaagactatcctggccaacatggatgaaaccccatctccactaaaaatacaaaaattagccaggcatggtggcgcacacctgtagtcccagctacttggaaggctgaggcaggtgaatcacttgaacctgggaggtggaggttgcagtgagctgagatcacaccactgcactccagcctgggcaacagacagagtaagactccgtctcaaaaacaaaaagacaaaacaaaacaaaaaaaaccccacaaaaaaaaaagaagtatcttgcccctttatattatcagaaaagacttaacggctcattatagacaacttccttctgaaatcaaacctggcctgggtcgttatgttttcaaagcagaaagccagacgaacctccaattttgacagtaaaatcatgggcgaccatgcagtttctcgctgccaggtcccgatgcacaaacttcttggcgttcaggtaggccatcccgtcagcaatctctgccgccatctgaatcatctcttgaagggtagggggagggcggccaggattattctaaaacagaaacacggggttggtgtttcagcagcactgggatccgaggaggccaggagcgggtgctccaccgagtaccccgctgggtcccccgaagcagcttacctcagcctctggccgcagagaacggaggtagctcttcaggtctccgtgagccatcagctccatcaccaccagcgtgggctggcccttggacaccactcccaggaggcgcacctgcagagcaagcaaccagggttcttggaggagggtccgtgattcgactcaccagggttctcctccctccctggtgtctatgtcacacacagcaccctgtggcctggatgcagcgtgctcagccctggtctaggagagcagacatacctgcccggacagcagacagataggcctttgtatttttttttttttaattttcgagacggaatcttgctgttacccaggctagagtgcagtggcgtgatctcggctcactgcaacctttgcctcccgggttcaagcaattctcctgcctcagtctcccgagtagctggggttacaggtgcccgcctccacacccggctaatttttgtatttttagtagagacaggatttctccatgttggtcaggctggtcttgaactcctgacctctggtgatccgcctgcctcagcctcccaaagtgctgggattatagccactgcacccagccaggcctttgtattttaatcattccctctgcctggctctctgttccctgccacatccacagggcccagctcctcatgtcctctaagtctttgctcaaatacacccctgtccaaccctcctttcctccctttcttcatgtttccatagcatttgctcctaatgtataaagggtttggagtcagctgggggtggtggcttatgcctgtaatcccagcactttgggaggctgaggccggtggatcacctgaattcaggagttcgagaccagcctggccaacatggcgaaaccccatctctactaaaaatacaaaaattagctgggtgtggtggtgggctcctgttatcccagctactcaggaggccgcggcaggagaattgcttgaacctgggaggcagaggttgcagtgagccgagattgtgccactgcactccactctgggcgacagagagagactctgtcttaaaaatatataaaaataggctgggcgtggtggctcacgcctgtaatcccagcactttgggaggccaaggcaggcggatcatgaggtcaggagatcgagaccatcctggctaacacagtgaaaccccgtctctactgaaaatacaaaaaaattagccaggcactgggcgtggtggctcacgcctgtaatcccagcactttgggaggccaaggcgggtggatcacgaggtcaggagttcaagaccagcctggccagcatggtgaaaccccgtctctaataaaaaaaagtataaaaagcattagctgggcgtggtggcaggcacctgcagtcccagctactcgggaggctgaggcaggataattgcttgaatccagcaggcagaggttgcagtgagctgagatcatgccactgcactccagcctgggtgacagagtgagactccatctcaaaaaaaaaaaaaaaaaacaatcagccaggcgtggtagcaggcgcctgtagtcccagctactcgggaggctgaggcaggagaatagtgtgaatccaggaggtggagcttgcagtgagctgagattgtgccactgcactccagcctgcacaacaaagcgagactccgtttcaggaaaaaaaaaaaaaaaaaaaaaaaaaaaaaaaaaaaaaaaaaaaaaaaatatatatatatatatatatatatatatatatatatatatatatatatatgaaataaaataaaaataaaggttttggagtctgtctccgcctgctgttttggaagctctacaggggcaggtatccactgtatcacagggacaagagcagggctttaaatgccccataaatatgtgtggcaaggatgaaagcacataggactcaaagaggaacaaaggagcagaaaggcaggaagagttggtgctgccttcaaaggagagtaggaacgagggcaggtggtatcaggtggacctctatgtggtcctgggttacaaaggtgccaggaaaaagcaagaaatggaagagtctaaaaagcaatggaagattgtggaaaatgatggaagattccggaaagtggtggaagattccagaaaatgatggaagattccagaaagtgatgaaagattctggaaagcaatgaaacattccagaaagtgatgagacagtgatagagtctggttccaggcgaagtgggagaggatgggatttgagaagggaatgatccctcctcacacctctaggatgggaagcttagtggagtgaggggtgggtaggaggttacaccctgtgtcctctgtcgctctgtgcaggaggaggaggcagagaaagggaagggtcaggaaagccagcccatgtcccacccccactggactcaccacgtgatggcaggtgaagcccttcatgaccgaggcctcattgaggaactcaatccgctctcggagactggctgactcgttgaccgtcttcaccgccacgcgggtctctgcctcacccttgatgatgtccctggcattgccctcatacaccatgccgaaggagccctgccccagctctcgaaggagggtgatcttctctcgagacacctcccactcgtccggcacgtacacagagcatggaaacactacttcttacttatctacacagcatccttggaggatcccttgggggtctgcagccaccttccacccaagccctcacccaaaccccctcgaaaacactcatgaaatgagttctgtgatccaggacccatgccgggcactgggcatatggccgagaacaggacaggcatctgcacccatggagagggcatggcagagactcaaggaaggagccacaactggtccaagatcctggccaatatgtcctgaggcaaacctgcatccccatccttcttgtctgatttcagacccttgctatggaatgatgctacttcccacctgagactactgtttctgcaaagtgccaaggggatggaagacaggttgtaataggttggggaaaaaaaaagccaggatacttggagctcttcccatgaaaaggtggagtctatctcaccaccccttggccctgggcatggccttgtgagttattttggtcaatgggaatcaacaagaattgtccaagcagagatttggaatggactgttgccctggagcttgccctggagctttctactaggaaccaacagaggaccatggaatgaagcctgagccagcctgctggagcctaagaggctagatggacagagtgaggctcagcctcccccagcttagggcccccaccttgggaccacccagcctactgaccaccagacatgtgagtgaaatcatctaagactaccgagtgctagctgacacaccagcaaaatgtagctacatgggtgaagccaggcaagaccagaagaactgcccagctgagcccagcccaagtggtcgaccctgcccaagggtcccagaccggctagatgagcccattcaggcaggtgccaaataccatgtgtccagatgcacacagtaatgaggtttctgcagcaagggcagtttggcaagctcaaatgaataagagggcttttcttggcctccctggggaacccatccttcactctcactcaatggtgaaggcaaaggaagctgatgagtagggttctggccacccacagggaagggatggtactcaccatcactggcactgagatactcagggtttgaagaagcgtaaagcggtcccagcggcccatctggctgcctggaggaggaaaacgaggcacgttagcttgagattctcatgggactctgcagaaaggtgtttcatacaagactccccaaggcaaatggcagcccttaccagcagaatccccataatcctagatgcagtctagggcagggatgggggacctttatgttttgaatggaagcccatcagacaggtatgtaagtgcatcaacatgggagcactcatccctccctgggtggttttttttttgttttgtttttgtttttgtttttacatttcagagttgcagtcttgctctgttgtggctggagggcagtggtataatcatagctcactgcagtcttaaccttctgggctccagagatcctcccacttcagctttctgaatagctgggaatacaggtgctcaccaccacacctggctaatttgtaaaatttcatatagacagggtctcactatgttgcccaggctggtcttgaactcttggtctcaagtgatcctcctgcctcatcctcccgagcggctgggactacagatatgcacgaccatgcagggctctggctggctttttaaataatttatggccatccatgtaacacttaaaagccactcacccagtactgttctagagcgagctcatcccgactgatgagaaacaattattaaattttcaggaaactagtgagccagttgttaaatacaagcatcattaaagattaaattgtacaatgccttccaaatagaacaaaaaatataaattatagaggcttacaattaaataaattatcctaaaagcaaagacaatacatgttcaaaactcatcacttcctaactctcatactacatttaaatatgatcaatgcagttgaggttatttacattatatcatttatacaccatattgtatccatagggtggattcaatggggagctattatgtatctctttctaacactgcactcagtaatattatgtctacagcttgaatttagacatcctgggaatatttacattacagaaactggcaaatgctataactcaggactggatttgttgttctgttgtttgtccaggcttgagaaagtgatgagaaaaatatttttttgttttgttttgtttttgagacaaagtctcactctgttgcccaggctggagtgcaatggtgcgatctcggctcactgcaacctctgcctcctgggttcaagcgattctcctgcctcagcctcctgagaagctgggattacaggcgcacatcaccacaccttgctaatttttgtatttttagtagagacggggtttcaccatgttggtcaggctggtctcgaactcctgacctcatgatccgcccgcctcggcctcccaaagtgttgggattacaggtgtgagccaccgtgcccagctgagaaaaatgtttaatcatgtagattaaacttaaaagcgtgtcatgtctgcaactgtgatgttgcatgtggcacaaaatgttcttctgatatttaaaaattaccatctgactcagcaaagacgtcactcatatcactgatgaacatatatgtcttatttcagttttgtcctactttttttttttttcccgagacggagtctccctctgtcgcccaggctagaatgcaatggtgcgatttcagctcactgcaacctccgccaccagggttcagtaattctcctgcctcagcctcctgagtagctgggattacaggcgcccaccaccatgcccggttaattttttagtatttttagtagagacgaggtttcaccatgttggccaggctggtctcaaactcctgacctcaggtgattcacccgccttggcctcccaaagtgctagcattacaggtgtgagccactgtgcccagtcaagtcctactccttaatgtaaattttgaaaaattaatcaacattcacattggagctttacttgtttatcaattgcaataataggttagcttcggatataaaggtttgggcaaaaaaaaaaatcaataaaaacattctgtgagaatcaactgtctagagggaatttacaataaagagttgtgtatatcatattatgacaattatctgtaaattgcatgttacacatcctatatcagcaaaattcataataaacttaaatatgcctatacctatatcaaggcatgttttcccccagagaaccaactgttcccagcacaccactgaactcactgaactcacctctttctcaggaatagataaatacttccaatcacaacactgaagagaaagacaaagatgagggggccgatgataatttttgcaatatttgacgggacgtctactgaaatagaataagaaaatatatgtttcatatcaatgtgtttccaacaaagttcacatcaaaaatcacatccactcctggaatgggtgggccaccctgttccttccctcccttgtccataaacctctctgctgctcttccacatcctgattttccagcagtcccgaaacagtcccgtaggtgcagtgggaccaggcagtgggctcagaggtcagtattctggaagcacactcttccccacccctgccccaaatcactgctcatttccatccctcccacatctcaggcagtggatgcaggacccttttctgtcagtttaatgctctgctgttgcccctctgaaatgcttattcattttattttaatttttatttatttacttatttttgtgacagagtcttgctctgacacccaggctagagttcagtggcacgatctcggctcactggaacctcctcctttcgggttcaagtgattctcctgcctcagcctcccaagtagctgggactacaggcatgcaccaccacacccggctaatttttgtatttttaatagagacagggtttcaccttgctggccaggctggcctcaaactcctgacctcaggtgatcctcccgcctcagcctccgaaagtactgggatgacaggcgtgagccaacgtgcccggccaaattcttaataattttaaagcaaggagttctgcattttcattgttcactgggtcttgcaaattacatagctagtcccgatcccagcatgacttttgacagatgtaaacttcttttaatttttattttttagagacagggtcttactctgtcacccaggctggagtacagtggcacaatcacagttcaccgcaacctcaaattcctgggcccaagtgatccccctgtctcagcctcccaagtacctgggattacaagcatgcaccaccatagctggctaatttttgtatttttttgtggagacagagtctcgctatgttgctcaggctggtctctaatgcctgtcctcaagcaatcctgttgcctcagcctcccaaagttctgggattacaggtgtgagccacctcatctagccaaaaaactctagtaacaaagatggagacactagcaacaggtgccaggcacttaacatttgtgtcattaaaatgtccctccacctcctgaagtggttctgttattatctccatgtacagatgaggaagtgcaggattgccagataaagaaaatgtgatacatacacaccatggaatactacacagccatgaaaaagaatgagatcatgttctttgcagcaacatgaatggagctggaggtgattatcctaactgaattaacacagggacagaaaaccaactacctcatgttctcacccataagtgagagtgagacactgaccacacatggacagaaagaagtgaacagtagacaccgggactgctatggtttggatctgtgtccccacccaaagctcttgttgaaatgtaatccccaatgttggaggagtggccgggtgggaggtgattggatcatggaggcggtttctaatgggttagcaacatccctactgggtactgtataataagtgggttctcatgggatctggttgtttaagaagtgtgtagcaccatctccccgtcttaacaccttgctcccacttcaccttccaccatgattgaaagtttcttgaggcttcctcagaagctgagcagatgccagcatcatggttcctgtactgcctgcagaactgggagccaattaaacctcttttctttataaattactgagtcccagtctcagacctcttcctcttcctctctctcttctcttctttctttttctttcttttatctctctttttctctctttctttccttttctttctttttctttttcttctctctctctttcactctttctttcttttttattttttgagacagagtctcactctgtcacccaggctggagtgcagtggcgtgatgtcggctcactgcaacctccgcctcccgggttcaagtgattctcctgcctcagcctcctgagtagctgggactgcgggtgcacaccactatgcccagctaatttttgtatttttgggtagagatggggtttcaccatgttggtcaggctggtctcgaactcctgacctcaagtgatccgcccacctcggcctcccaaagtgctgggattacaggtgtgagccactgtgcccggccaggtatttctttattgcagtgtaagtacagactaacacaggtgcctacttgagagtggtgggtgagaagagggaaaggatcaaaaaacgacctatcaggtactatgctgattacatgggtgacaaaattatctgtacagcaaacccccaacaacacccaatttacttattttattttattttttgagacagagtctcactgtgttgcccaggctggagtgcagtggcacgatctcggttcactgcaagctctgcttcccgggttcctgaggctcctgcctcagcctcctgagtagctgggactacaggcgcccgccaccatgcctggctaatttatttttgtatttttagtagagatggggtttcaccatgttggccaggatggtctcgatctcctgaccttgtgatctgcccgcctcggcctcccaaagtgctgggattacaggtgtgagccaccgtgcccagccacaatttacttatataatgaactgcacaggtacctctgaaacttttttttttttttttaagtgcaggatcaggccaggcatggtggctcatgcctgtaattccagcactttgggaggccgaggcgggtggatcacttgaggtcaggagtttgagaccagcctggccaacatggtgaaatgccatctctactaaaaatacaagaattagccgggcgtggtggtgggcacctgtagtcccagctactgtgaggctgaggtgggagaatcacttgaacccgggaggcggaggctacagtgagctgagattgtgccagtgcactccaaagcaagcctccatctcaaaaaaaaaaaaagtgcaggatcaaagagggcaagcaccgcagcagctgataggcctgagagtcaaggccagggccagcacctgcggcctctccaagtcatcccctgcaatgtcccaccatgctcagtgctaagcacagccccagtcagctgaggctgccatggagacttacaatagtctgtcacgtagaaataggtgggttccgtccaagagccgttgcccgcaagggaggtggcccggattcgcacgctgtagttccccggtgacagcccacgcagcctgcagccccgttccagagcgaagtgcttgcgggagacgcagagatgcagctcctgggaggaagagaggaggagaaggagggtggctgagctttgcacatctgggagtgtccacccctcgcagggagctcacagccaggatcctgctcagaaatgacgccaaggcagcaaagcacagactaagacacataagcgactttgagaattgcagaattttataaccatagtgctatggataaagatatatgcagaggttatcattatcggtaagagccagacttcctaagccagaagctgagcattaaaccctgatggtttcttttcttttccttttttttttttttccagacggagtttcactcttgttgcccaggctggagcgcaatggcttaatctcggctcactgcaacctctgcctcccgggttcaagtgattctcctgcctcagcctcccgagtagctgggattacaggcgctcaccaccgcgcctgcctaattttgtattttcagtaaagacagggttttaccatgttggccaggctggtctcaaactcctgacctcaagtgatccgcccacctcggcctcccaaagtgctgagattacaggcgtgagccacagctcccagccctattatctattttctattaatattaatttccataatattatctttctaaaaatcatttgttttatttttaattgacaacagtattataggtcaggcacagtggctcgtgcctgtaatcccagccctatgggaggccgtgaagggaggattgctggagcccaggagttagagaccaacctgggcaacatagccagaccccatttccacagaaaatagaacaattagccgggcacgatggttcgcacctgtagtcccagctactcaggaggctaaggcggaagaatcacttgagcccaggaggtcaagggtgcagtgagctatgaaggctccaccgtactccagcctgggtgacagagctagaccctgtctctaaaataaataaacaaaaataaaaataatagttgtgtacacgtatggggtacagtgtaaagttatgttacagtataaattgtggaatgattaaaacaagctaattaaatcctcatcacttcatgtacttatttctttgttgtgagaacatttaaaatctattcttctagccattttgcaatatgtgttattagctatagtcaccattcatctacagagcagtggattcctagaacgtattcctcccatctgaaactttgcaccctttggttcacgtctctccttgtttttcctttaatcattttaaaatgcaaaagtgggcagggcgtggtggctcatgcctgtaatcccaatactttgggaggccgaggtgggcggatcacctgaggtcaggagttcgagaccagcctggtcaagatggtgaaacccccacctctacccaaaatacaaaaattagctgggcatggcggcacacgcctgtaatcccagctacttggagggtgagacaggagaattacttgaacccaggaggtggaggttgcagtgagccaagattgtgccactgcactccagcctgggtgacagagcaagactccatctcaaaaataaatacataaataaataaaatgcaaaagtgactcctagctcacaaatcattagaaatcaggcagcaggccacatttagcctatgggatatagcttactgactgacccctggtttaagagattatatggtttgtccgagatctcatagctgcaaagtggcagggccagctcttgaactcagaactgtctggctctacagctacttgggaggctgaggcaggagaatggcgtgaacccgggaggcggagcttgtagtgagccgagatcgcgccacttaagtccagcctgggtgacagagcaagactccatctcaaaaaaaataaataaataaaaagaaagaaactaaaaaaagagaactgtctggctctagaacttctccttaagaccactgcagaatatttttgccatgtatccagcaaaattagaaaagagtggaaatgaaggatctgcagggcctatgccagatttcctgcctttccctgcaactcccagcctctgtcacatcagaaccaaatggataaatgtgcttaatgtctaaggacaaataaaaaagctctttctttgccacggtgctgcctttcgatttttttttttttaatcattataaaaacagttgaagcccgggcacggtggctcatgcctgtaattccagcactttcaggggccaaggcgggcagatcacgaggtcaagagattgagaccatccttgccaacatggtgaaaccccgtctccactaaaaatacaaaaattagccagttgtggtggtgtgcgcctgtaatcccagctactcgagaggctgaggcaggagaatcacttgaacccgggaggcagagtttgtagtgagtcgagatcgtgacactgcactccagcctgggcaacagagcaagactgtctcaaaaagaaaaagaaaatgtggtatactttgcctcaaaaataaacacataaaataaaataataaataaataaataaaacagttgggatccacccaaatggagatttgcaaagtgggaaacataccctgtgataagcacgtaactagagataattccagaacttatgagaagagacaggaggctcttgggaataagaccatgaaacctgcaagcatcgagcccaaaactctgaaaagttttcgacacagttccaagctaatagtgcatgcagagaaccgggctggaacatttaggaggggggtggagagtggagaagagaaagaaatgttaaaaaaaaaaaaaaaaaaaaagccaacaaccccatgcttatcgtgtgacaataacagcaagaaaacaaatcagtctggtggcaggggtgggggcagggaactccagtccaaagtttcttccaagtggaatgagtcaccgagtagagagggacaaataagcaaatatagaaacccaaggtagctgctatccaggacaaaggggaaatgcatcttctttttttttttttttttttttttttttggagacggagtttcgctcttgtcacccaggctggagtgcagtggcatgatcttggctcactgcgacctccgcctcccgagttcaagcgattctcctgcctcagcctcctgagtaactgggattataggcgtgtgccacaaagcgagactccagcctgggcaacaaagcaagactctgtttgaaaaaaaaaaaaaaattatctgggcatggtggcggatggcgggcctgggtgacacaccatgactctgtctctgaaaaaaaaaatttttttaacgggagatactgaaaatgcaattaaatagctagaggtggctttgtttatgaaactagcaaaagaaaaaaaaaataccttccaccagctgggcacggtggttcacgcctataatcccagcactttggaaggccgaggcgggcagatcacgaggtcaggagtttgagaccagcctgaccaacatggtgaaacctcgtctctactaaaagacaaaaattagccgggcgaggtcgtgggttcctgtagtcccagatactcaagaggctgagggaggagaatcacttgaacccaggaagcggaggttgcagtgagccaagatcgtaccaatgcaccgtagcctgggctacagagatagactccatctcaaaaaaaaaaaagaaagaatgaaagaaatgccaaactctttcctaaagcagctgtgccattttatgttcccaccagcaatgtatgagggttccgatttctcctcatcctcaccgacacttgttattgtccgtctgtttgttttttgccacgctcgtgggcatgaagtggtattgcatcgtggtcttgatttgcatttttgtcatggctaatttggggctgagttttgtgttttgccctggtaccaggctggggttgagagtgggaggtgagagccactcaagggtgaggagcagattccagaggaagttcggggcattgttgacagcaagaatacagattctgcagagtgaacaatgcccgtttccactgcagaccctccttgattttttttctgcttctgtgtccaacttgtccccatttgcccagaactttctgagtgtggacattgaaaatctcacatcccagggagccctcagtcctggctaaacctagacaactggtcaccctgttggcactggatttaactcgaatcctaacttctcctagcttcttcccatgcctttgactggcccgtgtctcctgttcctgggacccaagggtcactattaggaattcccatcacgaatccccaacagcctctgccccacacagcacaaccccaatcccacccagaccaactgtgttcaccctagagagaagcagagatgggggagaaaatgaaaggagaatgtgaggttacagtcaccttcttaagaaccttttcatagacacatttctgttattgccaacaatgtccttaattacctagcattgctttgatcaagaaaaaaagtgatgtaaaactttatttatttatttacatatatatatatatatatattgagatggtgtctcactctgtcacccaggctggagtgcagtggtgtgatctcggaatcactgcaacctctgcctcccgggttcaagtgattctcttgtcttagcctcccgagtagttgggattacaggcgtgcaccaccacgcccggctaatttttgtatttttagtagatacgaagtttcaccatgctggccaggctggtcttgaaccctgacctcaggtgatccacccaccatggcctctgaaggtactaggattacaggcgtgagccactgctcctggcctaaaactttatttttatgtgcacaatttatactgttggagtgtaattttactccatttacaaaattctctctagcatgtggtgggagtgaatattatggtatgtaagttacagctcaataaagctgtttctaaattaaaaaaaaaaaaaaaatccctcatgcccaagccaatcagcatacagcattcctctggtcacatgattgggcactggatgtcacatgacctcagtctagctgggaatgctgggatgcactctgtcttcctctgggtttggcactgcaaagaaatgaggtttggaaccactacaaccaccggtggacaaccaggggctactgggctcactgccaggagccgttaagatgcaactgacccaggctaggcatggtggctcacgcctgtaatcccagcactttgggatgccaaggtgggtggattacctgaggttaagagctcgagaccagccaggccaacatggtgaaacctcgtctccattaaaaatacaaatattagctgggtgtggtcgtgggtgcctgtaatcccagctactcaggaggctgaggcaggagaatcgcttaaacagggaggcagaggttgcagtgagctgagactgcaccactgcactccagcccggatgacaggatgacagagtgagtgagactccatctcaaaaaaaaaaaaaaaaaaaaaaaaaagatgcaaccgacccaaaggaatcctggatccagccatgtgagaagctcttcagttgttcaactctgggagctaagaagcttttcctctatcataagctagtctggatacagggggattcctttttcttcttttttctttttctttttttttttttttgagatggagtctcactctgtcgcccaggctggagtgcagtggcgtgatctcggctcactgcaagctccacctcctgggttcacgccattctcctgcctcagcctcccaagtagttgggactacaggcgcccgccaccatgcccggctaatttttttgtatttttagtagagacggggtttcaccgtgttagccaggatggtctcgatctcctgacctcatgatccacccgcctcagcctcccaaagtgctgggattacaggcgtgagccactgcacccagcagatacagggggattcttaactgctgggggataacaacacaaacgaactaaactccagagcatgtaattttaacttctacattacactgaacaaaggtcatcccaaacattttatcttatttttttggagacagagtcttcttgctctgtcacccagtctgcagtgtagtgagtgagtcacagcccactataacctggagctcctgagctcaagcaattctctcctcagcctcccaagtagatgggactacaggcatagaccaccacacctagctaattttgaaattttttttttgcagagatggggtctggctgtgttgcccaggctcaaactcctggcctcaagcaatcctcccacctcagcttcctgagtcactggaattacaggcatgagccaccatgcttggcccccaaacatcattttcaatggctcttcatccaccaattctatggatgcaccgtcttccatgtgtccattctccaatggatggacatcttagtggtttgcatattttgctactgatgaaaatcttatgcatagagctttgttccctgccccaaatttgaattatttccttaggacctacaggattaatacatataggataatatattaataaactttgcaattatggcccccagggaatcatgactttctgtgtctatgagactctggaagcctcagtatccagctcactgagatactcagaggatgtattgtacttcctcattctgggcttagccatgggctcactttgccaaagggacactagcaaatgtgatgcaaacagagtcctaagaagtgtttgtatatggggcatgtccttccttgcctgggctagctcactgggcagtgagagaacacatgaggacaaagctccaagtgcccccagctgaggccccagccatgtgaatgaggccatccagccccagccaaactggcccaggacaaaggaatcacccagtgaacctgcagaattgagagaaagaataaatgtcctttgttttaaaccagtacctttgggggcagtttgttacgcagcaagaactgactgaaacaataactaaagctgtcaatccaaaaagctaaaatggtttccagataaaattagtattacctaacatggtaaaaaccagaggcaatccaaatccccaaaaataaatgataccccaatcatgagattaaattctatctagcaactacaaatcataattccaaaggctattgtggacagagacatcaaaaggcagaggaaagtaactcatgaatatggattagaggcatatgcacgtttctgccaattaaaaactagctgagctctgtatgataaggaattttattttaaaaatgaatattaaaaaaggcaaatcaagccattcatttagcaattttattttaaaaatgaatgttaaaaaaggcaaatcaagccattcatttagcaaacagggccccaaaataggcccagaatgacaagttcagtaaggacactttctatttttgaaagtttactttttctgtgaagctgtgaagggccacatatagtctctgttgcgtattcttttttttttttttttttttgagacagagtcttgttctgtcgcccaggctggagtgcagtggcacgatcttggctcactgcaacctttgcgtcccgggttcaagcaattctccctgcttcagcatcccgaggagcagctgggattataggcgcccaccattacgtccagctaatttctgtatttttagcagagacggagtttcgccatgttggccaggctggtcttgaactcctgacctcaaccctgttgcacattctttacaatgctctgcaagccagatttggcccacaagccacaataatttagaattagatctcaattgtaaattattgtcaaagccaaaatctttggttgccaagagtagatgtggtcccaggaggggtagagggaggtccacctggttataggaggactccctctcaaagttccaggaaatcagacattttgctgtaatctctgttagttgttggcaaactctggcccaccaactaaacctggtccaccacgtgtttttgtaaataaagttttattggtacacaaccacatccattcatttacatatcacccatggcagctttctcagtagaatggtggaattgagtagttgtaacagaaatcatctggccacggagtcaaacatgtttactatccagacctttatggtaaaaaaaatttggcagtttctggattgaaatatcagtcatgcatttggatcatgattctattcttccaggttttgtgcagcaacttaaactctggaagcctcagtacccagctcactgggataatgtgaggacgtattgtacttcctcagtcccaagaggtatattatttttgcattttggcatttctgaaattggaatgcatcttacaagcaatgcattttacaaacacttaacagtactcaggatctatattctacgaaaaaaataaaattagaattaacggccctttttttttttttgcctagctgtccataaaaataatggggcctctcaaaatttcctagaggtaataaaatgtgatcaatgagatactctgtgtaacgtgctgaatgtgtttgggacatacagtgagccctgggaagagcttagcaactgtttgggttcttttgggttatttgtcttggattctatgtcttgtgcatctctgcactcacccagcaccttgcatggtgtctggctcaatggaagcatctaatgaaagtaacttataaggtttttgttgttgctgtttttgagacagagtctcactctgtcacccaggctggagcgcaatggtgcaatctctgctcactgcaacctccacctcctggcttcaagtgattctcctgcctcagcttcccaccttggcctcctgagtagctgggattacaggcacccaccaccacgcctggctaatttttgtatttttgtagagatggggtttcaccatgttggccaggctggtctcaaactcctggcctcaagtgatctgcctgcctcggcctcccaaagtgcttggattacaggtgtgagccactgtacccagcaatttataaggttttaagactcaaataactccttctaaagtgaaatgagtctcctgttgtggtgggaggcagacatcattcaacttagaggacacagctggaaagcaatgtgagaaactaagaaaagtaacaagctggtagattggcatttctgacccatcttcctgcgaagtcaggtatcaaggctttaagtactaatagcacagtacctgatgagagaagcactggaatcaaaatttcagcagaggaaggaggtaccaagtgcaactctgaaggggcatgctgaagtgtgcaggggcatgcccaagagtcaagggccttacctcatcaccatatcgccgataactcacttcatacagcacgatcagaccattgggctccttcggctcctgccacatcaagtggacgacgttgttctcaaagatttcatgcgtcacagggccaacaatgtcatcagccttggctgtaaggagaggaagtgagaggcagggatgtaactcttggatgagatcccacttctgccacctgtccatggtgcaaccttgggctggtgacgtcattttcccacaacccattttcctcgtcagagaacggacatctaaaactcatcccacaagattgttaggaagattaaatgggttactttctgcgtataacttttttttttttttgagacagagtcttgctctgtcacccaggcgggagtgcagtggtgtattttctaaagtttacataatgattgcctatgactcataattttaaaatatgacctggcatggtggctcatgcctgtaatcccagcactttgggagctcaaggttggcggaccacttgagctcaggcattggagaccagcctgggcaacatggtggaaccatctctactgaaaatacaggtgtggtggcacacgcatgtagtcccagctactcaggaggctgaggcaggagaattgcttgaaccagggaggcggagattgcagtgagccaagattgcgccattgtactccagcctgggcgacagagcaagacttcatctcaaaaaaaaaaaaaaaaaaaaaaaaggccaggttcggtgctcatgcctgtaatcccagcactttgagaggccgatgtgggtggatcacttgagcccaggagttcaagaccagcctgggcaatatggtgaaaccccatctctactaaaaatacaaaaattagctgggcgtggtggcagacacctgtagtcccagctacttgggaggctgaagcagggaatcacttgacataggtggcagaggctggagtgagctgaggtcgcaccactgtactccagcctgggcgacagagcaaggctccgtctcaaacaaaaatgaaggccaataaggtaaaatacagatatgcactgcttagagggtggagaatctgtccttggtcagccttgatgtcccacccatgacactcggaccccggagcagcagccctaccttcaggcatggtcctcgcactgacgtaggctgccacactgcaccgttcctcaggggtgtcctggttgcaagcctgcagctcgatgcgatagcccgtgaagtgtcgcaagccggagatgaccagcgactccttgttcaccaccttctcaaaaggcctgtgctcctccggactcgtgggcacgctggtcgaggaagtgttggggaaagctgccaccgtgggcacggccaccgtcacattcccaacatcgccaagggacctgcgtttccgagatggcctggaacgacagtaggacatgtatgatgacaccatcaccatcattttttttaaaaaagtgacactggagaataaaaggcttgattaagaagaaagatcagagcgcaggagggtgcagcaatggggaacatggattacaatacagactgccaggaatgaccactcagagcagctttcaatatacccttgtgagcatctgaaggattagagcaggcccacctcgtgagggatgagtgcttctaagaccgtcaatggtagacacacaccgatattcccctcgacatgctcgatttcaggtttttcattttgcagataaataggccagccagggtcagtgacaaaaataagacaccaaaagcacgtaagagtctagcttttcaggaagccctgccaaatggcatttgctcattggcccaagctactgatcgacatcatcagtttaaataggaaaaaatacatcttttccttcttattgctgcttagggcacctgtataatttgagtgattaagctgcaattcttagaaaaggaatcacatcactcaggtcaggaagattaactccaagaaacatctatgcaattggcacacttctccccatcccttaagaagacatattaaacaacaaaggttgatagctaacaaattttaaaatacaaagaaaaaaggataaagaagaaaatgtaggctgggcgaggtggctcatgcctataatcccagtactttgggaggccaaggcgggcagataacctgaggttaggagttcaagaccagtctggccaacatggggaaaccccgtctctactaaaaatacaaaaattagccgagcctgatggtgcacagctttaatcccagctactcaggaggctgaggcaagagaattgcttgaacccgggaggcggaggttgcagtgagctgagatcgtgtcactgcactccagcctgggcgacagagtgagactctgtctcaaaaaaaaaaaaaagaaaagaaaatataaatcactcataaatccacagcccactgcttcctttggacaattttttccctgtaaatattatgtgtgaacatgatgaggatcaagcctgttttataagtaaactttgtctacttattatattggaagcatttactaaatattttcctttcaacataacattttaggagagaattttgggacttttcctttttaatattagggttttcctccatcatctacaaaagtagcatgtgttccctgcagaaaacttggaaaacgatgaatgactgtaaaatattccatttgctacgtgagtcgtcactcacttaaccatcctccttatttatttatttattttgagacagagtttcactcttgtcgcccaggctggagtgcgacggcgtgatcttggctcactgcaacctccgcctcctgagttcatgcgattctcctgcctcagcctcctgagtagctgggattacaggagtccgccaccatgcccagctaatttttgtatttttagtagagacggagtttcgccatgttggccaggctggtctcaaactcctgacctcaggtgatctgcccacctcagcctcccaaagtgccaggattacaggcatgagccaccgcacatggctctttttttttttttttgctgttataaatattcctttgatcattgtctgattgtcttattacttccccaaagtagattcctagaggaaaatattactaggttcagggagataagaaactctttaagcttcttaatacctacagctaaatggttgtccagaaactctatattgacttgtggttgcaccagcaggccatgagactgcattccaggacaatctcagcaacccctaagccttaatagtttttttttttctttctatgtttgtttgtctagatctttaacccaagagattaaaaatatgctatcactcgactacgttatttgcggatctttatattactgagtgtgacttcatttttcctttattggttctctgtgattctccaaagaattgtcccctccttgtcttttgtctgtttttccatgaatttcttgtgttttccttactcctgtgttgtttattcattaaggatattaaccttttatgtatcgtgctatacaacttactcttttccatttgccagtaagctttctttaaatgatttgaaacaggctttcatgtttatttgtacaatttaatatatcagtaacactttaaaacgtgttcctttataagtcattctagatggggttattatgagttgtgctaaggttttacggcaattttgaaagggatcttttcccttattttatattctaattattgcttgtgtatctacagtctttttgcttatttctatgtacctactttcccaaactctaactcatttaaaaagtttcataattggctttcctgggttttcaatgacacactagaagaggggtcaacaaaattttcccgtaaagggctagataataaatattttgggttttgcaagccaaatgacctctgtcacaactactctgtcattgtagcttaaagcagccctacatgatgtgtaaacaagtgggtggggttgcattccaataagagttcatttacaaaaacaggcagctagcccatgggccatagtttgcctacccttgagctagacgctctgcaaatagcaatgactttatttcccacattccattctttacaactctgatttctgtttcttgtcttattacattggctggatgcccagagaaatgttaattagtaatgatgagatggggcttccttgttttgttcctaactctgctaagaataattttaagaatgatgttagcttggctgttggtttaacctaggtaatatttatcttgtagaagaaatattctattatgagttttatgaagcctctttttttcctcccctttctctaagttaggaattttaaattaaggttattgaaacagatatgatcttccttattgcacctcttgatgaactagatgatgttatcaaatcttctgatcttaaaccatccttgcattttggagataaacaatattgccagtgcagtgttttatttgggacatttgaatctaacatcacatattagcttggcctgtggcttttgttcagtgcagtatctttgtcaagttcttttttttttttttttttttttgagacagagttttgctctgttgccaggctggagtgtgcaatggcgcaacctcggttcactgcaacctctgcctcccaggttcaagcgattctcctggctcagcctcccaagtagctgggattacaggcgtgtgccaccatgtctggctaatttttgtattgttagtagagacagtgtttcaccatgttgaccagaatgttctcaatctcttgaccttgtgatccgccccccacctcagcctcccaaagtactgggattacaggcatgagccaccatgctcaacctctttgtcaagttctttaagggtgttatgttcatttcataaaatgaactgggataacttttatagatttctgtgccctaaaatagtttttctattataggaaatagttgctctctcacaatttgaaagaacgtgtctataaaactctctgggccaagggacttttttgaggaaattatttgacacatatctttttccaaggttcataaccacttaatttttctgcttctttttgaatccatttagacaagttaaattttcccaccttactgaaactttcaaatttagcaagtgcaccattgtccaaagaacttaacacattaaaattttcttcagacgctagttttatgtcatcttctttccttctggtttgtgttttccctttgattatgtttaccataggcttagctgttattgcttttcccttcctaacacatttatagttttatagtttaaagtttatttcttaatttatcaatccatttaagtctgctaagtaacatcaaagccaagctttgacaatattctacaagttaaggtatgtgatattcacattttcattattttccaaaaggacttcaatggaagtttccatttctgctttggcccgatagatatgtaagtgtttaactttttaactttttttttttttagacagagtctcgctctgttgcccaggctggagggcagtggcgtgatctcggctcactgcaacctccacctcccaggttcaagtgattcttctgcctcagtctcctgagtagctgggactacaggcgcacgttaccacatctggctaatttttgtatttttagtagagaaggggtttcaccatattggccaggctggtctcaaactcctgacctcaggtgatccgcctgcctgggcctcccaaagtgctgcgattacaggtgtgagtcactgcgcccagcctgtaagtgtttaacttttaaccaccaagaagtgaagttttctgtttaatcttttgaaattaacttttagtttctattgcagcgtcatcagaaaatgtgtggtcagaaaacaaatcctactttgggggcatttcttaagattctctttatggtctttttgtattaaaagactaacaacattgtagaatggaaaagaaaacagctccaccacttatcaagccaaagatatgtccgtattagcaagattcagataatttctatacaggcacaaatgggtctcgtgaaaataaccaagacgttggtgcttcatgagtaactactgagaaattggtatctcaacaaccagagatgtaaaatgggctcatcaaacaggccaaatgagtttatataccaaaaagattataaccaaaaagaccatgaagtggcaaaagacaaagcatcaactgatttttttttttgagacagagtcttgctctgttgcccaggctggagtgcagtggtgtgatcttggctcactgtaacttccaatttctgggttcaagcgattctcctgcctcagcctcccaagtagctgggattacaggcgtgcatcatcatgcccggctaatttttgtatttttagtagagacggggtttcgccatgttgcccaggctggtttcaaactcttgacctcaggtgatctgcctgcctgggcctcccaaagtgctgggattacaggcatcaggcatgagccacagcacctggcctaggcagcattttattatccagcaatcccacactaacctggtcatctcaaccaagggtccttctgaccccatcacccagggggatatttagcaatgtctgaagatatttttggttattactactttagggggaagacacactactggcatcagatgagtggaagccagggatgcttctcagtgttgttggacagtgccctagaataatctgaccccaaatattatttattattattattagtattatgtatttattcttttttttttttttttttgagacagagtctcgctctgtcacccaggctggaatgcagtggcgagatctcggctcaccgcaacctccgcctccagaaatcaagtgattctcctgcctcggcctcccaagtagctgggactacaggcgtgtgtcaccatgcccggctaatttttatatttcttgtagtaacggggtttcaccatcttggtcaggctggtctcgaactcctggcctcaagtgattgccccgcctgggcctctcaaagtgttgggattacaggcgtgagctaccaagtccagctgtggccccaaatattattttatttttattttttttgagacggagtctcgctctgtggcccaggctggagtgcagtggcacgatcttggctcactgcaagctccgcgtcccaggttcacgccattctcctgcctcagcctcccgagtagctgggactacaggcgtgtgtcaccacgcccggctaatttttatgtttcttgtagtaacggggtttcaccatcttggtcaggctggtctcgaactcctggcctcaagtgattgccccgcctggggtagctgcgtcaccacgcccagctaatttcttgtatttttagtagtgacggggtttcaccgtgttagccaggatggtctcgatcttctgatctcatgatccgcccgcctcggcctcccaaagtgctgggattacaggcgtgagccacccgaatattattaatagcaggactgagattgagatctgctttggaccaagcccgtacatttttagacccttcttggctacagttagtattgcaaatggccactagagggcagatcaggccacacaggtgcctgggaaaaaataaataaataaacactctgctaaaggaagaaaatctctccaagtggtcccaacttgcctctttagtctcacctcctgttcctcccaaaagccacgacaggtaaacatctccttgcctttctcccaagttctccaagctttttctctctcccaggaccatactgcttcattctcttaagactcaagttgaaaagaaacgtccctggccaggggcggtggctcacgcctgtaattccagcactttgggaggccgaggcgggcggatcgcctgaggtcgggagatcgagaccagcctgaccaacatggagaaaccctgtctctactaaaagtacaaaaattagccgggcgtggtggcgcatgcctgtaatcccagctactcaggaggctgaggcaggagaattgcttgaacccgggaggtggaggttgtggagagccgagatcgcaccactgcactctagcctgggcaacaagagtgaaattccatccaaaaaaaaaagaagaaggaaagaaggaagggagggagggacggacggagggagagagggagggaataaagaaaagaaaagaaagaaggaaagaaagaaagaaggaaaaaaagaaagaaggaaggaaggaaggaaggaaggaaggaaggaaggaaggaaggaaggaagagatccctgactctcctccgtggaattcagtgagcgacacggtgttcttttgttcataccctgtcgccctttcatgaaaatattctgtttccagatcaacctccattcatggtgtaggagctgctgggtcggggcacccagccgcggggagctcagactccggggacccccacccacctctgcaaatgcacgcgggaggtgcagagatgtttagtgagcaaacagtggctgcaaacagaaggcagggagggggtacccaggaagcactcccatgattctatgttttagcaagagtgtgttagtgaaggtttctccccacattcatgcccagatttcatttcagagtgaaggcattggatttctgaattggtgaagcatctgctctccagcacagctgcccgccgcatgcaaaaagccacagaaacccctgggttctccgaggcatctgcctggcacgccgccggccctgcgcggagcaggcaccaggggtcgcacaggtgagtcatacctagggtcctcggcaccagtgcctgaagaggtttttctgtggaaacaaaaccaacgcctttgaggacagagggaacttcattagacagaccactgggctctgacacttggaggccacatgtgtccgagtaagggcaccctggctttgaccctggaccactcgctcccatcacttgctagacggagtgagctacatcttccccagcaggtgcaggggtccagcaagggaaggggaagaaatcagagaaaattctccccagagacggcctgctgaggtggccctgggatgtcaaacgtgactacatgtggacatcacaactgactcagccacttctccaagtctggcagaatttttcttttctttcccttctttcttctttctctctctctttctggtttctttcctctttctccttttcttttctctttctcttttctctctccctctctctccttccttccttctttcctcttttactttctttctctctttttccctctttccttccttcatttgctttctttctctttccttccttctttttttcattttctttctctttcttttctttcttttccttttttccttccttccttccctcctctctccctcccttgcccccttcctttctctgtcctttctttctctctttcctttctttctttctctttctttctttctttctttctttctttctttctttctttctttctttttctttctctcttccttccttcctctttccctccctccctccattcctttctttctttctttttttcccttccttcctttttgagacagggtcttgctctgttgcccaggctggagtgcaatggtgccatcatagctcacagcagcctccaactcctgtgctccagcaattctcccgcctcagcctccggagtagctgggactacaaggcatgcaccaacatgtctggctattttttttttttttttccttttttagtagagatagggtctcactctgttgctcaggctggtctccacctttggcctcaactgattctcccacttcggcctcccaaagtgctgggattacacgagtgagccactgtgcctagccaacattttgtttgtaacaggtgaaacagtaaccactttgaagccttggctgtccccctgaacattcttttggactcagggtcataggggaaacatgcaacaaaaaaagaaaaagaaaagaaaaaaaaaaaagaggattcttacacactggtggttctgggagaaaagtctgctcggatgaatagcattggtaaacatctgaacagatacttttaatttttttttagagacagggtctcactctgtcacccaggctggagcgcagtggcgccatcatcgcttatcgtagcctccatctcctggcctcttgtgatccttctttctcagcctccccatgggctaggagttcagacatgcattaccatgcctgactaatttttaaactgtttttttttttttttggtagcgatggggtctcattatgttgcccaggctggcctcaagcaaccctaccacctcggcttcccaactagctgggaccacaggcttacaccactgcgctcagctaaagcctcaataatcacggccaggcacggtggctcacacctataatcccagcactctgggaggccgaggcaggcagatcacctgaggtcaggggttagagaccagcctagccaacatggcaaaaccccgtctctactaaaaatataaaaattagctgggcgtggtgctgcgcacctgtagtcccagctacttgggaggctgaggcacaagaatcactcgaacccggaaagggtgagctgaaatcgcaccaccgcactccagcctggacgatagagtgagactctgtcaaaaaaaaaaaaaaaagagagagagagaaaaaaaaaaatgttaatcgtctaacggagtttgttttggaactcacgtggagaccagctcaggagaggtaagaaaggcaaatgctgagttttgtccatttttccccttttgtgcgattatttgctcttcctgataaaattcccctcgaaatttcgaaactgcaagatctcttcctccacccaggaaagggctccattcagactccacccacccttctgccgtctctgggtcccactacctctcggtccctaagtaatgaccttccaccaacaccaagccaattggcacccactaagagagcccagcgccaagtcctgacctggggacgaaaaccacgttgtgcaggtaatcctcaaacgtcttcctaaacgaggactcctccagctccttcaggatctgagagtctgtctttggacaggagcagcattcgccggccgaatcctcatactcactctggttgtgcttctgagaatcttcagactcgaatggtggagaccaggtcctcgagggcagcttcagccctggagaaagaaacagaaaaggggggctcaagtctctgcggctgaacacacatacacacacacacacaccccacacacacacacaccacacacacacaccacacacacacacaccacacacccccccacacacacacaccacacacatcacacaacacaccacacatacacacaccacaaacacacaaccacacacacacaccacacaccacacacaccacacaacacaccacacatacacacaccacaaacacacaaccacacacacaccacacacaccacacaccacacacacgcaccacacacacaccatacacgcaccacacacacactacatgcacacctcacacaccacaccacacaccgcacacacaccacacaaatcacacacacaccacacacacccacgccacacaccacagaccacacaccacacaccccacacacaccatacacgcaccacacacacaccacatacacacttcacacacaccacacaccacacaaatcacacacaccaccacacccacgccacacaccacacacacaccacacacgcaccacacacacacacagtgaagggggccttctcagagaggctgagctgagacagagcctagatttgagctccgctttggaaaaaagccagacactatggttcacgcctgtggtcccagctacttgggaggctcaggtgagaggatcgcttgagcccaggagttcgaggctgcagtgagctatgattgcacccctacacttcagcctgggtgacagagtagaaccctgtctcaaaagattaaaaatatagccgagcacagtggctcacacccttaatcctggcactttcggaggccgaggtgtgaggatcacgtgagcccaggagttcaagaccagcctgggcaatgtggtgaaaccctgtctctactaaaaataaagtaaaataaccaataaaaataggccaggcagctcacacctgtaatcccagcactttgggaggctgaggtaggcagaccacctgaggtcaggagttcgagaccagcctggccaacatggtgaaaccccgtctttactaaaaatacaaaaattagccaggtgtagtggcgcatgcctgtaatcccagctactcaggaggtcgaggcaggagaatcgcttgaacctgggaggtggaggttgcagtgagctgagatggcaccactgcactccagcctgggtgacagagcgagactccgtctcaaaaaaataataaataaataaataaaatatctgtatctagagtgtcatctgagaagtgcatgtcaacatgttttattagtttagtgcataagtaattgcagcttttgctattaaaagtaatggcaaaaaaccacaattacttttttttttttttttttttgagatggagtctcgttctgttacccaggctggagtgcagtggcgcgatcttggctcactgcaagctccaccgcttgggttcatggcattctcctgcctcagcctcctgagtagctgggactacaggcggccgctgccacgcccggctaatttgttgtatttttagtagagatggggtttcattgtgttagccaggatggtctcgatctcctgacctcgtgatctgcccgccttggcctcccaaagtgctgggattacaggcgtgagccactgcacccggcccacaattacttttgcaccaacctaatagaaactgccaggtggctgggcgcggtggctcactcctgtaatcccagcactttgggaggccgaggcgggcagatcacctgaggtcaggaggtccggaccatcctagccaacatggcgaaaccccgtctctactcaaaatacaaaagttagccgggcgtggtggtgggtgcctgtaatcccagctactcaggaggctgaggcaggaggattgtttgaacccgggaagcagaggttgcagtgagccgagattgagccattgcactccagcctaggcgacaacagcgagactctgtctcaaaaaaaggcaacaactgcccgacaccataatcacaggactgaagattataaggtaaccagacaatgcttctgtcttcagtggacttacagtctacaataaactcataaatacacagtcacaggtcagatgttggggtaaaagaacagtgggtgtctgcgggtgccattttcatgaaggggtctcaaagaaagtcaccactgagacatcctgaattcagcaaaggaaagcaccatccacatatcgtggtgtaaagcaattcagacatagcagaaacccagcagaaaggccccaggacaggaattttcttggcacattaaaaaacgtctggccaggcgtggtggccctctcctgtaatcccagcactttgggaagccgaggcaggaggatcacttgaggtcaggagttcgagaccagcctggccaacatatagtgaaacgctgtctctactaaaaaatccaaaaatcagctgcacgtggtggcacatgcctgtagtcccagctacttgggaggctgaggcaggagaatcacttgaacctggaaggcggaggttgcattgagccaagattgcgccactgcactccagcctgggtgacagaggaagcattccatctctcaaaaaaaaaaaaaaaaatctctggaaaccaatatagctggaagggggtgagagagagaatggtgggagggggttagaaaaagataaagggggccaggtacagtggctcttgcctgtaataccagaactttgggaggctgagggggaaggatcacttgagcccaggagttcaagataagcctggccaacaagatgaaactccgtctctaccaaaaaatacaaaaattagccaggcatggtggtgtgcgcctgtaatcccagctactcaggaggctgaggtaggaggattgcttgagcctgggaagtcgaggctgcagtgagctgagatggggccactgcactccagcctgggcaacagagtgaaatcatgttgaagaagaagaaaaagaaagaagaaggagaagaaggaggaggagaaggagccaggtcacagctgcatgaaaatatcaatcaatcaattaatcaaccacacaaataagatgggagggcagagtagaatgccatatggaattcttttttttttttttttttttttttttttgagacagtcttgctctgtcgcccaggctggagtgcagtggcgtgatcttggctcactgcagcctccgcctcctggattcaagtgagtctcctgcctcagcctctcaagtagctgggattacaggcgcctgccaccaccctggctaatgttttgtatttttagcagagacagagtttcatcatgttggccaggctggtctggaactcctgacctcatgtgatctgcccacctcggcctcccaaagtgctggaattacaggcctgggtcaccacactgggcctccacatggaattctaaggggtccattcatgagtccagaaatcagacttgatcagtgaatggttctcacccagggggtgattttgtctcctactagggacattgggcaacatctggagatatttttaggtgtcaggacctggctggggcgtcctcctggagcatggaatgggtgaagaccagagatgctgctgagcaccctgaagtgctcgggacagtcccaccccagagaatgatccaacgccagacagaaaaaacaccaagacagagaaaccctgacctaaaggcatgagaggagatagaggaaggaacttttcaaacatgcatagaaaagggaatttaaaaattaataaatgaagaagaacaccagtagcttataaaggtagcagtcctaaaaatacaaaatacaatactatttctctcttttttttttttttttttttttttgagatggggtcttgctctgtcgcccaggctgcagtgcagtggcgcaatcttggctcactgcaacctctgcctcctgggttcaagcgattctcctgtctcagctccactccccgtaactgggattacaggcatgcaccatcacacctggctaattttttgtttgtttgtttgttttttgtttttgtttttttgggatggagtctcgctcttgttgcccaggccggactgcagtggcgctatctcggctcactgcaagctctgcctcccgggttcacgccattctcctgcctcagcctcccaagtagctgggactacaggcgtgcaccaccatgcccggctaattttgtatttttagtagagacggggtttggccatgttggccaggctggtctgaactcctgacctcaggtggtccacccgcctcagcctcccaaagtgctgggattataggcttgagccactgcgcctggcattttttttgtatttttattagagacggggttttgccatgttggccaggctggtcttgatctcccgacctcaggtgatccacccgccttggcctcccaaagtgctgggattacaggcgtgagccactgcgcccagccgatttttgtattttttttttttttttttggtagagacagagttttgctgtgttggccaggctgatctcaaactcctgagctcgaacgatctgcccgccttggcctcccaaagtgctgggattacaggcatgagccatcgcacccagcctacaatacttaagtaccgcagctggtcatgtcttaagccccgaagtcaaatcccagggttcttgtgacccacggtgcaagcacagttatgcctctggtacagccactgagatggacggacacagctctttacaagcaaaatctgcaacagtccctggagagccacctcccctgctgccactctgcttggtgcctggtgactgctgagcaaaggaaattccattttctctcctccccttaatgcctcgaggatagacaataagctctaaatcgtgtatcaagtaccttcctgtgaatggtgagtatccactcggaaacccaagtatttacacagctttaaaagcctatgagagactggaaaatacttcttaagtttataaatagacatagaataccctgcctgggttaactctgatgggagctagttacagcattacagatggaaaaaaaaatgtagaactgcctgaataagggaagctcctggtattattattattattattattattattattattattattattatttggagaggaagggatatttgttcaggcacaggtatcattcctgatacctgctacctcttcctagaatccactgcatgaaacatggtacactgtggttttcctgagattagaaaaatgaagcataatgggccaggcgcggtgactcacgcctgtaatcccagcacgttgggaggccaaggtgggcagatcacgaggtcaggagatcgagaccatcctggctaacatggtgaaaccccgtctctactaaaaaatacaaaaaattagccgggcgtggtggcgggcgcctgtagtcccagctactcgggaggctgacgcaggagaatggcgtgaacccgggaggcggagcttgcagtgagccgagatcacgccactgaactccagcctgggtgacagagcgagactccgtctcaaaaaaataaaaagaaaagaaaagaaaaatgagcataatgaagtctctagaatcagattcacagagacagaaaggaggatggtgggtgctggggctgggggaaggagaaggggagtgagtgtttcatggggacagagtttcagtttgagaagatgagaaagttctggagatgatggtggtaatggccgcacaaccacggcaatgcacttaatgcagctcaactgtgctcttaaacatggttataataataaattgtatgtgatgtatattttaccgtggtaacaacatatacactagtgatattaacaggaagggtttgtaagcttatttatttgtgtgtgtgtgtgtttgaaattgtggaaaaataagcatcacataaaatataccaatttaccatctcaatttttgttttgttttgtttttggtggagtcttgctctgttgccaggctggagtgcaatggcgtgatctcggctcactgcaacctctgcctcccagattcaagcgattctcctgcctcagcctcctgagtagctgggattacaggcacccaccaccacacccaactaatttttgtatttttagtagagacggggtttcaccatgttgcccaggctggtctcgaactcctggcctcaaagtgatccaccccacctcggcctcccagtgtgctgggattacaggcgtgagccactgtgcccggtaaatctcaaccattttaagtgtgcagttctgtggtattaagtgcattcacaatgttgtgcaatcatcaccaccatcatctccggaactttctcatcttcccaaactgaaactctgtcctcaacccgtcccctccgcagtccctggcactccccattctactttctgtctctatgaatctgaggactctagggacctcctaggagtgaaatcacacagaatttgtccttagtgagtttccttttaatgatattaactttgtgacaattacaaataaaaccatgtttaaatggtcccttggtaattacagatttagactttcggaattaaaaaaaaaaaaaaggaagcttcgagtgacattactggtggcagctctcacgggtggttctggttacttgaatgcagggccaacagcttacagcggagctgatgactggactcgccctggagttatataaagcatcagagcagataaatcacgtttgcaaccctcggctcaggcggggatgatgtcacacacatacatatagcatatgagcttagagctgggacagctcccagagatcatctgtcctcccgccccttctcccaaaaaggaggcagacggtgacttgcttgggaacttagccaaagcccttcagcaggtcagggccagagccaagagcaaatgttgagctcctggcctcagccacacctcgccagtggccccctggccttctcctccagggtcatggaccgaggatatcactaacagaaaatatctcaagaaaaatacatcaagatgcacaaggaaaccaaaactaaagaaggaaatgggcccagcgcagtggctcaggtctgtaataccagcactttgggaggctgaggcaggaggatcgcttgtggtcaggagttcgagaccaccctgggcaacatatcaagatccccacctctaaaaaattattattatttttattattattatttttcttagatggagttttgcttttgttacccaggctggagtgcaatggtgcaagctcggctcattgcaacctccacctcccgggttcaagcgattcttctgcctcagcctcctgagtagctgggattacaggcccacgcctggctaatttttgtattttgagtagagacggggttttgccatattggccagggtggtctcaaactcctgacccctggtgatccacccgcctcggcctcccaaagtgctgggattacaggcatgagccactgtgcccggcctaaaaaattattttaaataattagccaggtatagtgtctcaggcctgtagtcctgtgtagtccagctactcaggaggctgaggcgggaagatcgtttgagcccaggagttcaagcctgcagtgagctatgattgtgccactgcactccagcctggacaacagagtgagaccccatcttaaaaaagaagaagaaaaagaaaaagaaaaaagtgacagatgcttctccagtttggtgggttctaaaaaaacccaatgttaaaataattttaggctgggcgcggtggctcacgcctgtaatcccagcactttgggaggctgagacgggtggatcatttgaggtcaggaattcaagaccaccctggccaacatggtgaaaccccgtctctactaaaaatacaaaaattagccggtgtagtggcagcacctgtaatcccagctattcaggaggctaaggcacaagaatcgcttgaacccagcaggcggaggttgcagtgagccaagatcaagccactgcactccagcctgggtgacggagtgagactccgtgtcaaaaaaaaaaaaaaagaaaataataataataataattttaaactaatgtatacacactagtttgagactttaaatattattccattttccttcagatggatggaggtctattaagtaaacaagattaagaaaaatttgtcattaagttttataataaaattatttatataattatttataaattttatttataatttttatacaataaaatgattgcacaacattgtgaatgcacttaatgccttttttttttaattttgtataattttttttatatatatagagacagggtctcgctctgtcacccaggctggagtgcactggaataatcatagctcactgcagacttgaactcctgggctcaagagatcctcccgcctgggcctcccaagtaactgggactacaggtgtacaccaccatttttttaaatttttttagagatgggatcttgctatgttgcccaggctggtctcaaactcccggcctccagtgatcctcccaccttggcctcccaatgtgctgggattacaggcatgagcgccaagcctggcagacatttttaattgaaagtatggggtgggggatatgagataaccaattcttgctgccttcgatccttacaactaaaggatctcagtggggccaaaatccttccctgactttgtcaataaccattagttgtgtttctagctttgcacagaagtcttgcgtgggttaacacagctgcatccccatcagtgtgaggagggatgaagagaacaaggaaggcagggagggagaaagaaggagagacaagaggagaaaatcccagagggaaatggtgccaagacatgggaaaaatctggttttgacacaagtcttcagtgcgtgcttgtgttacgatgtttaaaaatgtgtatgtatgagccggtcatagtggctcacgcctgtaatcccagcgctttgggaggctgaggggggtgaattgcttgaagccaggagtttgagaccagcctgggcaatataaggagactccatctctacaaaaagaagtttaaaaattagccagggccaggcgtggtggctcatgcctgtaatcacagcactttgggaggccgaggcgggtggatcatttgaggtcaggagttcaagaccagcctggccaacatggtgaaaccccatctctactaaaaatacaaaaattagccgggtgtggtggcaggcgcctgtagtcccagctactcaggagcctgaggcaggagaatcgcttgcgcctgggaggcagaagttgcaatgagccgagatcatgccactgcactccagcctgggtgacagagtgagaccctgtctcaaaaaaaaaaaaaaaaaaaaaaattacctgggcatgctggtgcacacctgcagacaattgtggtgttccagcaactcatgaggctgaggcaagaggattgcttgagcctgggaggtggaggttgcagtgagcagagatcatgccactgcactccagcctgggcaacagagtaagaccctgtctcaaaaaaaaaaaaaaaataggccgggtgtggtggctcatgcctgtaatcccagcactttgggaggccaaggtgggtggatcacctgaggtcacctgaggtcgggagtttgagaccaggctgaccaacatggagaaaccccgtccctactaaaaataccaaattagccgggcgtggtggcgcgtgcctgtaatcccagctactcgggaggctgatgcaggagaatcacttgaacccgagaggtggaggttgcgatgagccaaggtcgcgtcattgcactccagcctgggcaacaagagtgaaactccatctcaaaaaagtaaataaataaaaaataaaataaataaataaatagataaaaacatgtatgtgtgttttcatatgagatagaatggagtgtgtgtgtgtgtgccttccgacactgagacacaggaagagatagctgcttccctagaggtgaagcaaagtgcatcagacacacgtgtgcaaaccccaccgatcctagcacagctgcctgcactcacctttgaggcaataatccagctcgaacagctcactgtcttccgcctgcctctcccagaaaaccaggtagtgggtgatgttgccattggggtcggagggtggtttccacttcagaataatctgggatgatgagttagacactgagattggatccaggggcacagaggggtctgtcagggagaaaggaaatgggtccatcatgagaaacagtgtgcaaagaaagctggtgggaggatggcgggggacacacaagttaaagacatcatgagggcacccatcccagcattttgggcggccaaggcaggcggatcacgaggtcaggagatcgagaccatcctggttaacacagtgaaaccccgtctctactaaaaatacaaaaaattagccaggtgtggtggtgggcgcctgtagtcccagctacttgggaggctgaggcaggagaatggcgtgaacctgggaggcggagcttgcagtgagccgagattgcgccactgcactccagcctgggtgacagagcaagagtccgtctcaaaacaaaacaaaacaaaaaagaaaaaaaaaaccaccaccaaccaaccaaacaaaacccaaaaaacccaaagtaacggaggtggccgagggagctggggatggggagggagtccaaacacctgggagctagaagtttctgaaaactgtaagtcttttggtgtcactaaaagatacaggatgaatgagcggggattaactgaagaagatagggttgatttataaagtttgaattcgaggccaggcacagtggctcatgcctgtaatcccagcactttagaaggccgaggtgggcgaatcatctgaatcacctgagatcaggagttcgagactacacctggccaacatggtgaaaccctatctctactaaaaaaaaaaaaaaaaaaaaaaaattagctggacatggtggtgggcgcctgtaatctcagcttcctgggaggctgaggcaggagaatcttgaacctgggcagaggttgcagtgagctgagaatgcgccattgaactccagcctgagagacaagagtgaaactccgttaaaaaaaaaaaaaaaaaaaaaaaagcttgaatttgagcctacaggacggggtttctcacccttagtactattggcttttaggactggataattctttgtcatgaaggagggtgcatcctgtgtgttgcaggacatggaacagcctctctggcttccgcccacgaaatgccagtggtttcatctccacagctgtaacaaccaaaaatgtctccagacattgattggcagctgttccctggcagagcagttaacctcctttgggaactactgctataagagaagcacttaggttttacaaaaatataattaggccgggcccagtggctcatgcctgtaatcccagcactttgggaggccaaggtgggcggatcatttgaggtcaggagttccagagcagcctggccaacatggtgaagccccatctctattaaaaatacaaaaatggctgggcgcggtggctcatgcctgtaatcccagcactttgggaagccgaggcaggcggatcacctgaggctcggagttcgagaccagcctgaccaacatggagaaaccttgtctctacaaaaaaaaaaaaaaaaaaaaaattcgccaatcgtggtggtgcatgcatgtaatcccagttactcgggaggctgaggcaggagaatcgcttgaacccgggaggcagaggttgcagtgagctgagatagggccattgcactccagcctaggcaacaagagcgaaactccatctcaaaaaaaaaaaaaaaaaaaaaaaaggctggcatggtggcttatgcctgtaatcccagcactttgggaggccaaggtgggcagattgcaggtcaagagattgagaccatcctggccaacatggtgaaatcccatctctactaaaaatacaaaaattagctgggcgtggtggcacgcctgtagttgcagctacttgggagactgaggcaggagaatcacttgaactgggacggggaggttacagtgagctgagatcacaccactgcactccagcctcagtgacagagtgagactctgtctcaaaaaacaaaacaaaacaaaacaaaaattagccaagtgtgctgtaatcccagcaacttgggaggctgaggcaggagaatcacttgaacctgggaggtggaggttgcagtgagtccagatggcgccactgcactccagcctgggtgacagagtgagactccatctcaaacaaacaaacataattaaattgctgtgaaatactccaggccaaaacaaacaacaaaacaaaaagaagtaacaagtgggaagagggaacaggcgtcgagatgaaacaaaaatgaccaaaggctgaagctgggaggcggctaactatggggttttgttctgtgttgtgaatatttgacaatttttcataataggatgaaaaatataaatattcccatcaagtggcttgttgctactgcctcgtctgaaactataagcctcaatacccagctcctttaaaagccaataactgactgggcaaggtggctcacacttctaatcccaggactttgggaggccgaggcaggaggatcacttgaggccaggggttcaagaccagcctgggtaacacagcaacgttctgtctctacaagaaatacaaaaattagctgggtatagtggtgcatgcctgtagtcccagctactcaggaggctgaggtgggagaattacttgaacctgggaggcggaggttgcagtgagccgagatcatgccattgcactccagtccgggtgacagagtgagacttcatctcaaagaaaaaaaaaaaaaaaagccacacatggtggtatactctggtagttccttctacttaggaggctgaggcagaaggattgcttgagcccaggagtttgaggctgcagtgagccatgatcaccccactgcattgcactctagcctgggtgacaaagtaagaccctgtctaaaaaaaaaaaaaaagccaataaccatatcaaggagcattttatacaacctcactgcatcagcctattaaaagcaagaggtctgattcacatacgaattcacattcccaagacacactcactggtggcatctgtctggacataaatgatgtcactcttggccccataggtccggcgttcatccgaaaaggtgaccagggtcttcacaaagatggcatactgggtccagggcttgagaccccgcatcagccaccctgggtggttctgtgatttggggtcgttggacctcaggggtgggtcaatgtctaccaccgtccaactgttggaaccacacgcatcctgcccgtcgaactccgtcacattctgataagggctttcaagacaaaacagcagaaggcagttacccttacaagaccgtcacactgagtgccgtgcagatgaggcctgggaagttacatcccatagggtcacatgttactcacccaacaatctaatgccacaagaaaaaataactcgggaacagccaaagagaaaggaactgtcaaccctgacatctcaatgaaaaaacacagcttgggcatcccttattcaaaacacttgagacttggccaagtgcagtggctcacgcctgtaatcccagcactttgggaggccgagaatggcggatcaccagaagtcaggagttcgagaccagcctggccaacatggtgaaaccccgtctctactaaaaatacaaaaattatctgggcatggtggcagatgcttgtaatcccagctattcaggaggttgaggcaggagaattgcttgaacccgggaggcagaggtagcatcagctgagatcgcaccactgcactccagcctgggcgacaaagggagactctgtttcaaaaacataaataaataaataaataaataaatgcttgggaccagaagtgttttggattttggatattttggggttttgaaatatttgcattttactagttaatttgcattgtactggttcagcatctctaatctaaaaatctgaaatctgaaatgctccaataagcatctcctttgagtatcaagtcggcccacaaaaagctttggattttggagcattataaatttcagattttcagattagggatactcaatctgtaataatagtaatagcaggagctccctcacaagttactgataagattagactgtgtgtcagtgctcagcaaggcacaaggtaaatcttgagggctagaactattattaatattactactggtcaggtgcggtggctcatgcctgtaatcccagcactttgggaggccaaggtgggcagatcacctgaggtcaggagtttgagaccagcctggccaacatggcaaaacccgtctctatcaaaaatacacaaattagctacgtgtgatggtgtatgcccataatctcagctactcaagagactgaggcaggagaactgcttgaacccgggaggcagaggttgcagtgagccaagatctgccactgcactgtaccctgggcaacagagcaagactctgtctcaaaaaaaaaaaaaaaattggggataaaaaagaaaaatagataagcaatacatttgataacatccacttagtagactgagctcctgactactaaggatgtctgatgagacatacacaggcaaggcaaaatagaatattgccccaggaaactggccagtccgggcttctatgggaaagctgtctgcttccattttaggcatttgataaaagcagacactattgactttgcatgccatcgactggtgagattgtaaaaaggaacctaagatatttattccaggaggaggagggagatagacaggaacccaagaggggcagattggagcacaaacgtagcaagcacagagccagccagccctcgcctcctcagcgtctctctaactcttctacttacgcctctttgtagaacagcatgaaccccaagaggtctcggaagtcggggggccagtacggctcccatctcagcaagatcttgtcaaaagatgtccgaatgtaagaaaatttaagtaactcattttcacctggaaaagttaaaacaaaaggcaaaaatgagctatttcagtgtagtttcagaccaaagcctgggacccccacacttcctggagggaccgtgagaaggcagaggtgacgctgctattcccttaagggtctcctccccatgtgcctggctgagtatgaatgggggaagattcaaaggtaagagccagttttgcaacttggccactcacactcacgtaagccaatgacttgactcagccagacagtcaactgaataagcgcagtctgtacccgcgcaagaaggacaaccggccaatagttattggaggaagggatttccaagggtgatgtttgtcctgacacaacgttgtctcgcatatggacttgtaagactgacctggaaggaggtgcaactccagtgcaaataaacctatgccaagtgagtttagagaccctgcagatcattagacatcggagagacgcatctaagtaattctctctgcctagaagacaaaccctctcctaaacctcaccccaacctcgctctctctccttgcactacattttttttgagacagtcttgctctgtcaccaaggctggagtgcagtccacctaccgggtttaagcaattctcatgcctcagcctctcaagtagctgggattacaggcacccaccaccacgtccagctagtttttgtattttttttttttagtagagatggagtttcaccacattggccaggctggtctcgaactcctgacctcaagtgatctgcctgcctcggcctcccagagtgctgggattccaggcgtgagccaccatgcccagcccttgcactacattttgacataagtaactaactccccatgaaggtatcccagaagcccttggcagctcactgtttagaatctgtcagggaagtgcagtcagcaggcagcctgcagctgcagaaactgcaggacctgctgtagcattccagccaaaacctgactctccctggacagcccccacctatgactgagcttggtagatgcctggccgtccctttgcaatgcagaacttccctgcagacaaccgtggccttgatctctttctgggtttggccaagactcagggatgcatcaccatctgagactctcccagccctatcctccctccttcccgctctctgttcacagaggtcagacacacgctattgtcaaaaggctcttcatggctgagcgtggtgactcacacctgtaatctcagcactttgggaggccgaggcgggaggatcacctgaggtcaggagttcaagaccaccctggccaacatggcaaaaccctgtctctactaaaaatacaaaaaaaaaaattagccgggcttggtggcatgtgcctgtaatcccagctattctggaggctgaggcgagataattacctgaacccaggggaaggaggttgcagtgaggcaagatcacgccactgcactccagccctgggtgacagagcaagactctgtcccaaaaaaaaaaaaaaaaaaaaaagaagctcttcctctgtttcatattttatgaatattaccctcaatacattttctgcactcctaacttcaacttggcagtcacttcccaggagatgcagactgacataggtattttactcaactttgaagtcttcagcatcagcctgatacacatataagaaggtgtcatccattcatccatcattcattcatccattcattcagtgcttgtatgacttcatcccgtatccggtactatatggcacagtaagcatagtgataatattaataaatgtgcagaatctgccctcagtaagaaagcctatcacacagtgagttgttagagggaagtaataccccctgggggtgactgtgatggatgagagaggacagccacattatctggtttgtggaccacttacagcaggggtccccagcccctgggccacagaccagtacttatccatggcctgttacgaacagggctgtacagcaggaggtgagtgataggtgagcaagtgaagcttcatctgtatttacagtcactccccatcgcttgcatgaccacctgagttctgcctcctgtcagattagcggcggcattagattctcacaggggtgtgaaccctattgtgaactgtgtacatgaggtacctagactgcacactccttatgaaaatctaatgcctgatgatctgtcactgtctcccatcacccccagctgggaccatctagttgcaggaacacaagctcagggttcccattgattctacatgatggtgagttgtacaattctttcattatatattacaatgtaatcataataggaataaagtgcatagtaaatgtaatgcacttgaatcatgctgaaaccatccccacccaccaccagtccatggaaaaaccatcttccactacaccggtccctcatgccaaaaaggttggggaccagtgacttacaggatgcctggtccccattggtcttcagggcaatgtcgtttctctcctggcgccccttggttcctgaaacttcttccatcttgtggatttctgacaagcagagtttggggttatagtggaagaagagtttcccctgagtgatggtgaggttgtgtttgctccagtcccagagctgccttaggttctggttgtccaaggcatagaaggagtagttcctatggaaaaaacacacacatctagtcattcaacggctggtcttctacaactccaagatggtgtggccatgctcggagttgatcttgttcagtgctacgtgcctaatcctctccacttgcttggcacatactcaacacatatttgttgaatgtggataacagaggaagttgaggaagttttcatggccaggaaggaggctcagctcagtcttgaagaggggtggtgagtctgtgatggactgaggaataggttttgcagaaaccaatttctgcaaataggggaaatactgataacacagaggcacctaagctgagttcagggaagagcaaagtagcctgttttggccaataggtgacaggaaatagctgtagttgcaatggaccagaccctctagtatattgcatgccagaccaagaccaagaacatgtggccatccttaataaggagaaaggagccattgaaggtttttgtttgtttgtttgtttgttttattgagatggattctcactctggtgcctaggctggagtacagataatatagtctaaactatattgtttagaccaccttctcaagtcacttaccagctcatgttgattaacatgtccttttgtccctttccccatttgctgtctgttctacagatgtgaggctggggctgaggcagccatcttgtgaccatgaggagcacaaagatggaaagaatctgggtcttccacagacctcctgcctatgagtcaatcttgatctagctagtttgagtttctgctgttttgctaatagagtttctaggacctcaaggagaaggttggaatatactggaatatactgagatggagtccatcccagaaattaggatggacaaccgggactaagagggaatgttcattttatgcatgccaaactctactcacaatgcagcccaaacagcaaatttagcaaaaattccagcctgtacccttggaggatgggcaccaaggttgggctgctcccacttttgtttctcaagaatgactataaaaaagcttttacaatttttggctggatggacctttaggcacattccaagttcttttttcccgaggttttgccagatatacttttatttgttttttatttgtttttatttgatttttaaaaaatccttaagtttttccttttcttttctttttttttttttggacagagtctcactctgtcacccaggctggagtgcagtagtgtgatcttggctcactgcaacctctgcctcccaggttcaagctattctcctgcctcagcctcccaagtagctgggattacaggcatgcactatcacacttggctaatttttgtacttttagtagagacagggtttcaccatgttggccaggctggtcttgaactccccgcctcaagtgattcacccacgttggcctcctaaaatgctgggattacaggcatcagccaccacacctggccaaaaaaatccttaagttgttctaatacacgaacttcctagttagcactcaggccatacacacaatcaggcccacgtacccaatttccaaggtctctcctcgaatcagacgtaacttccggaagaaggaaagtgacaccagagcgtaggatcggcggatttttagataccctgaaatttcttcaatgaggccgaggttggcttctagctcagctgccagattgtctaaggaaaggagagaatatccagtgggtttctatagacatatttcaatcttctcatgattctccatggtgagaagataaccctcaggctgcaaatgactggacatacccagctcaaaactcatcatgcttagaacacaatctgaagtccttagcattccttaaatgggtcaagcatacttctgccccaggaccttggcactggctgcgtctgttgctcagaatattattccaccatatatctccttggcttgttccatcatcatctcaaaccctcctttcccataccagagacttctctaaaatagcaacccccagcttggtgctggtggctcatgcctgtaataccagcaccttgggagggcgaggcaggtggatcacttgaggtcaggagttcaagaccaccctggccaacatggtgaaaccctgtctctactaaaactacaaaaaaaaaaaaaaatagcaacccctgttagtctccattttagaggttgacaaatgacagcccactggccaaattctacctgttttgtaaataaagttttattggaacaaagccatgcctgctagctgacatgggtctatggctgttttcatattacaacggcagagttgagtggttacggcagagactgcccggcctgccaggctgaatatattcatgaaagagccctttatagggaaaagttgcccatttccattccacctattaccctgctgcacttcccttcacagcacagaccacaacctgaccttacaatatctgtcgatttacttatgcgcaaaaatccatcaaggtaaggactttcccttactcactgtgagtattcagtacatgttcgctaaagaaataaacaaaggaatgcctttttgcctgacatggtatttcttttctttttttttgaaatggagtcttggtctatggcccaggctggagtgcagtggtgtgatctcggctcactgcaacctctgcctcccaggttcaagtgattctcctgcctcagcctcccaagtagctaggactacaggcatgtgccaccgtgcccagctaatttttgtatttttaggagagacaaggtttcaccatgttggctggtctcaaacttctgacctcaagtgatccgcccacctcagcctcccaaagtgctgggattacaggcatgagccacagcgcctggctttttttttttttttttttttttttgagatggagtctcactctgtcgcccaggctagagtgcagtggcgcgatcccagctcattgcaacctccacttcctgagttcaaacgattctcctgcctcagcctcctgcgtagctgggattacaggcacgcaccaccaagcctggctaatttttttgtatttttagtagagacagggtttcaccatgttggccaggctggtcttaaacttctcacctcacgtgatccacctgcctcggcctcccaaactgttgggattacaggcatgagccactgcacccggccctgagatttatttctgaaaacacagcctgcagttctgcaatagggcatattgcttgattgttaaaaacgacgattccaaagccaggtggggtggctcatgcctgtaatccctgcactttgagaggctgaggcaggaagattgctcgagcccaggagtttgagaccagcctgggcaacatagtgagaacctggccctggaaaaaaattaaaaaaaaaaaaaattagcccggcacagtgacacctgcctgtactcccagctacttgggaggctgaggtaggaggactgcatgagcccaagagtttgaggctacagtgagctagagttgccccactgtactccagcctgggcaatggagcaagaccccatctctaaaaataaaaataaaaataaaaataaatgtaaatgcagattcctgatgccccaactcccaaagtagaaaatgagaatctcaaggttagtaaggccaagactgagctgttcatttcaggttttgaggcagactcccagcatggttctatccatgggggagccactgaacgaccatcctaaaagtgctgtaggagcacgcagcagggtctgcactgcttttcttccccgctcacagctcagagggacatggagcccaacaggcacccccgacgcccacacagagacactcactgcctcctcgaatgttgatgatcagactcccgttgatgacggtgcatcctcggagctcctgggcagacgtcaccgagtcgatggtcttctcgccttctaggaggtggcacaccttgggacagggacccaggcatggggtgcacagcaagctaaggacggagcagagagagagagaaagagaaaggggaggggggtgtcacggtatccaaggtccttcagacatctcaggcatctttctgcctgatatggtatttctttgtgtgtgtgtgtgtgtttgtgtgacagagtctcgctctgttgcccaggctggagtgcagtggtgcgatctcagctcactgcaacctctgccttctgggttcaagagattctcctgcctcagcctccacagtagctgggattataggtgcccgccaccgtgcctggctaatttttgtatttttgagtagagacggggttttaccatgttggccaggctggtctcaaactcctgacctcaagtgatccacccgcctcggcctcccaaagtgctgggattacaggtgtgagccactgcacccggccctttctgcctgagatgatatttctgaaaacacagtctgccgatctgcaataggacatatcgcttgattgttaaaaatgtagattctggagccgggcgtggtggctcctgcctgtcattcctgcactttgagaggccaaggagggagggttgcttgagcctgggagttcaagatcagcctgggaagacagcacactatgcagggtctcaagtgatggcataagtccatcatgctacggcaaggtcttctgacctcagcattgttcacatttggggccaagtaattctccactgtggtagtgggggtggcgtcctatgcattggaggatattgagcggcatccctaggctccactcacgagctgccagtagcatccctcccacaagttgtggcaattaaaaatgtcctccaggccaggcaaagtggctcacgcctgtaatcccagcactttgggagtccgaggcgggcagatcacctgaggtcaggagttcaagaccagcctggccaacatggtgaaaccctgtctctactaaaaatacaaaaattagctgggtgtggtggcacgtgcctataatctcagctactcaggaggctgaggtaggagaatcgcttgaacctgggaggcagaggttgcagtgagccgagatagcaccactgcactccagctgggagacacagtcagactccatctcaaaaaaaaaaaaagtctcccaacattgccaaaagtcccctggggagggaggatgccagattgtccccagaaaagaaccactgccttaagtgagagaattatgccattaccctatggttgcaggtcctcttgcttttaccccaaagtgacaagactcatattttaccccaaagtgatgggacaggactcctgctggaccccacagtgatgggattcacaccatatcccatggaggcaggaccatgatctaccctgtgcgtgacagcaatgggactcatagcattatcgtggcgatatgttttggatctgtgtccccacccaaatctcatgtcaaattgtaatccccaatgtgggaggtggggcctggtgggagatgactggatcatggtgggcggagttctcatgaatggtctggcaccataccccttggcagtgtatagtgagtgagttctcacgagatctggttgtttaaaagtatgtagcaccagccgggcatggtggctcatgcctgtaattccggcactttgggaggccaaggcgagcggatcacttcaggccaggagttcgagaccagcctggccaacatggtgaaaccccgtctctactaaaaatacaaaaattaaccaggtgtggtggtgcccacctgtaatcccagctactggggaggctgaggcatgagaattgcttgaactcaggaggtggaggctgcagtgagccgagattgtgccactgcagcccagcctgggtgacagagtgagaatctgtctcaaaacaaacaaacaaaactatgtagcaccttccccctttctctcttccttcagtcatgtaagatgtgcctacctcccctttgctttccgccacgattgtaagtttcctgaggtctccccagaagcagaagctgctatgcttcccgtacagcctgcagaactgtcagccaattaaacctcttttctttataaattacccagttccatgtattctttatagcagtgcagaaatggactaatgcatgtggtaataagaatgtgccgttaccttgagatgatgggcctgatgtggcagaactgacagttaccccaacgtggcagaattcaacctgctactccaaggagacaggacatttgctgttctgtgtgggatgtgatgcaactacggctgtaacatgaccccatgtttaatggcaagtgacttgggcagcctttggttttgccagcctgcagcctgatgccatcaaactcacagcccccaggagtcctttgggaaccagtcctccccaacacggggtctctgagatcagttcttggttgccaaagcccttctagatccaggatgggcacaagatccaagccaagctgagcaccaccttctattcctgtgggggctcagaggtggtgggtacagaacttaagtcagtgcagtgagggttttgctagaacatgctggaaggggaaattgtcttccttctggagtatctaagggttttgccatcttgctagcatggggtgaagggtgagggagaagctgcctgataacaaaaccaacaaagaggaaaataaagatgaaggagactgatcaggtacatcgcttaagcttcttgatacagctatacctgaaccaactccctgaactttttggttatgggtaccaacaaactcctttaatcttggttaagtcaatggtttttttgttttgtttttgtttttgttttttttaagatggagtctcactcttgttgcccaggctggagtacaatggcacgatctcggctcactgcaagctccgcctcccaggttcaagtgattctcctgcctcagcctcccgagtagctgggattacaggcatgcaccaccatgccccatctaattttgtattttttttttttttttttttttttagtagaaacagggtttctccattttggtcaggctggtctcgaactcccaacctcaggtgatccacccgcctcggcctcccaaagtgctgggattacaggtgtgagcaaccgtgcccggccagttaagccaatttgagttggggttctggtgcatgaaaccacaagattcccaactgttacagtctccatttcttcatctgaaaataacaccaccaacgccacagcttgtgatgaggaactcaatgaagcataccacaaaagcacttcgcacacagaacgcaattttatccgttgctacaagggtcattttttattggtggcatccttgttgctgctgctgttgttctcacactcctgggtattcaactcttcagagtgatttttgtgactgtaggatcataaagtatgtatctggtcttcatcccggttcttggcacagagcttcaaaaacccttggaactttctgagtcacaggaatgcttttgttaggagtgttaggaatgtcggggtgacttgtgggggggggggtgcctagataacatgagggtggggggcggtcaccagaaagaacaaccctgtgatcagagggttggggcttttaggacctccagggagatgagggggctggaaatggcagtgttgaatcacatggtcaatgatttcaatcaatcacgcctaaggaatgagactccaattaaaactctggatactgggccgggtgcagtgcctcacgcctgtaatcctagcactttgggaggctgaggcaggtgaatcacgaagtcaggagtttgagaccagcctggccaacatggtgaaaccctgtctctactaaaaatacaaaaattagccgtgcgtgatggtgcatgcctgtagtcccagctactcggggggctgaggcaggagaattgtttgaacctgggatgtggaggttgcagtgagctgagattgagccactgcactccagcctgggtgacagagtgagactccgtctcaaaacaaacaaacaaacaaacaaaaactctggacgctgaagctcagtagtacttcccagctggtggacacaccagtatgtcaagagggtgatacatgctgttgccacgaggaggcaatatggaaattctgcatctagaactctcccagatcttgccgtatgtgtatcctttataataaaactgtaattgtatagcagggtttttaaatttgagacaagatcttgctctgccacccgggctggggtgcactggcacaatcttagctcactgcagcctcgaactcctgggctcaagcgatcctcctgcttaagcccctcaagtacctgggactacaggcatgcaccccctcacctggctaatgtttttaaatttttgtagagatgggatctcactatgttgtccaggctggtctcgaacctctgggctcaagtgagcctcccaccatggcctcccaaagtgctgggattacaggcatgagccaccacacctggccaggtttattttcattctgtgagttccttctagtaaattatgaaacccaaacagtttgtgggaatcccccaatttagagccagttagtcagaagtgtgggtggctgggggatccccaagatgctgccagtgtctgaagcaagggaaatctcatggagggctgagccttaaacttgtggcgtctgatgctaactttggaggaggatggtgtcagaacggtgttgcaagtacacccaggtagtggcagaacagctgaggcagaaacaaaatactgaccaaatgtttgacttcttttattgcctctattcttattatgtggcaggcaatgctctaagcctggagttggcaaacagtgggctgggagccaaatccagtaggccacctgtttttgcaaataatatcctattggaatatggccacatttattggttagtacatcgtctaaccctgctttcacgctgcaaaggcagagttaagtagctccaacagagaccatatggccctgagagctgaaaatatttactatctggcccttggccaacccccgttctcagctgccggtatacatgagtgaacaaagcagataatatgctttcccagtgggaaattataaatgaccatgagttctttgcagcctctcccaccaagaagtggagtctatgttcccacctgttgaatctgggcttggccatatggcttgctttggccaatggaatatttgcaaacgtgatacaagctgaggcttgaaaagcacttgaacattgaggtctgcccttcctggctgctggggtaagagacttatggagagagacccccactgaccatcaaagacacaagaggctcccctaaaccatcagccgtagctaaacaggcccaggccagacaaaccttcagtcaacacatgaaatcatcagagctcctaaaggagtgttttaagccactaagcactgaggtggttttgttacgcaacaagagctagctgatacactcacaaagcttatcatctggttggggagagtgaataaattgacaacaaaggctaggtacagtggctcaggccctgtaatctcagcactttgggaagccaaggtgggaggatcacttaaacccaggagttcaagacgagcctggggaatatagcaagacccccaacactacagaatttttttttagccaggtgtggtggtgtgtgcctatatagtcccagctactcaggaggctgtggcaggaggatctcttgagcccagggggttgagaccacagtgagccatgtgggtgccactgcactctagcctgggtgacagaccaagaccttgtctcaaaaaaaaaaaaaaaagacaaaaatatcagctagtgacaaatcgaagagttaaaactaaatgatgtgacagagagtgcacggatgattgactcagacgggaaggatttgccaaggaggtgacttttaagctgccatctagatgacgaggggaaaaagtggatcattctcaaatgcagggacaagcattataggaagagggaacagctaattgaaaggcacagaggaaagcggatgtagcaagttgcaggaaaagctcctgcggtaacgaccaccacggccagggggcaccggaatgaaatgagaatgagaactggccgagccctcccgatgaggagtttggattctgtccattggtcttgggaagccaccggagggttttagggaaggacatggcatatgatcagatgaccacttttattttttcttttgagacagagtctcactctgtcaccgagactgcagtgcagtggcacactctcggctcactgcgacctccacctcccgggttcaagcaattctgctgtctcagcctcccgagtagctgggattacaggcgcccactgtaatcccacgcctggctaatttttgtatttttagtagagatggggtttcaccatgttggtcaggctggtctcgaactcctgacctcaggtgatccacccacctcggcctcccaaagtgctggggttataggcgtgagccaccgcgcctggcccaggtggccactttttaccagtgtcactagaatggaagcaggagcaaagagattgttcaaggggactgggtcagaccagacatgatggtgaaatagatggaggtgtagacaaatttgagacctcagcttaataggaagaagtgagagaggccaagaagaatcaaggattttaggtaattctccccttcccagtggataccccatacgcattgaaaatttattcatcacaaatatctggtccttctcatctcaggaagcagcactgtgctattacatcccagcaggtactttggaacgacagtagatggtgagacctttttttttttttttttggagatgcagtttcactcttgtcacacttgcctgggggctaacgtgcaatggcgtgatctcagctcactgcaacctctgcctcctgggttcaagcaattctcatgcctcagcctcccgagtagctgggataacaggtatgcatcaccatgcccagctaattttttttttgtttttgtatttttagtaaagacggggtttcaccgtggtggccaggctgaccttgaactcctgccctcagatgatccgtccacttcggcctcccaaagtgctgggattacaggcataagccactgtgcctggccaaggccttttaacatgggttcccagaactctgctctgaaaacatcaagaactccttcccagataagccaccagaatggaagaaaacatctggccctatttgatatcaaaccacattagaaaatgccacagtacgattaagtctttcataagataaaaagaaaagcttcaggccaggtgcggtggctcatgcctgtaatcccagcactttgggaggccgaggtgggtggatcacttgaggtcaggagttcaagaccagcctggccaacatgatgaaacccggtctctactaaaaatacaagaaaaatttagctgggtatggtgacagatgtctgtaatcccagctacttagaggctaaggcaggagaatcacttgaacccgggaggctgagttgcagtgagccaagatcgcaccattgcacttcagtctgggcaacaagaatgaaactccatctcaaaaaaacaaaagcacaaacaaaaaaaaattggccaggcttgctgcctcacacctgtaatcccagctacttgggaggctgaggcaggagaatggcttgaacctggaaggcagaggttgcagtgagctgagatcatgccactgcactccagcctgggtgacagagtgaggctctgtctcaaaataaataaattaattaattaaaagcttcagaaataaaaatattaatttttttaaacctacgcaataaaatacggtgacaatgcacccccctctcctttgttttcttccgttcaggaaaggtcccagataccaaggatgtgcggtcaatttctcagggtttctgttttagcatctcccgcatcatcagtgagaaaatcaaaggaggttgctatatttctcaggccattgttaaggtgagggaaaaatgccttttatttaaggccaatgtcttttaaacaaacatcttgccagaagatattaacccattttttttatttcaattgtgattttaaaaagaaagaaatgaatcaaaaggaatatggtcatttcctcaatcttgggaatacactggccaaaaaaaaaaaaaaaaacctaaaacaaaagtctgtctggtatgaaaaggtgatttatagacccttttggtcaataaagccaaaaggtttttttggtaggtttttatcaacaacgagcaaaacaaaacatattgtacttgcaggtttcacaaacactcaaagaaagagtcataagaactgaaattacagcttgttttccttcccgccctctccacccagggaaatacaatttcccaccccaacactctcgcttggctaattctcaagtctgaagaggaagatactttacgtaagcaggtcagctcaaggcctcttgatgtgtgtctgtttctgatttgtttttgtgttgttttgtggtgtgtgtgtgtgtgtgtgtgtgtgtgtgtgtgtgttttaaaacaaaacataaaacctcaatacaaaaaccaggaaacagatttttgcaactcagttacggccccaaaatagctcatggaagaagctcacagtacgaacagaaagtctgcgatgtgcgtaggaaatctgactctgtcgaagagagaaaaccctgctatttctcacccaaacggcaggaaatggtttgattatactgtccttcagagaacagcaaagccctgagaataatgcagaagcgagtctcttcctcctggagacagtatgttctgggctaatcttggcacaccaccaggctacaggtcagggaagacacgaaagaccttggtatatcctttatgtgacaatgatgaagctacatcagtgaggacaggccacgtggaggattttagggaaaaccaaggactctgtccttattatattttcttgttctgaagccaaccacagaaagcttagaactgaggtccacaatgccagactgggtgcggtggctcacacctgcaatcacagcactttgagaggccaaggcaggtggaccacctgaggttgggagttcgagaccagcctgaccaacatggcgaaaccctgtctctattaaaaatacaaaaattagccgggcatggtggcaggcacctgcagtcccagctgcttgggaggctgaggcaggaaaatcgcttgaacccaggaggcagaggttgcagtgagccaggttcgtgccactgcactccagcttgggagtcttgcggcaagactccatctcaaaaaaaaaaaaaaagaatggtgggcacaatgccagaagtatatactatctggtcctttagagaaaaaggtagtcaactcccactcccaagcccaggaccaaaacagggtgcaaaagtagcatctgagagcagagacctcactcatagccaattaaccctgggtttgcacacagttttaacaagcggcatcgtcacaaccaaccccacgttccttctcctctcggctgccccccagacccacatccagaactcacttgctggaattcatcgtgtacccggagggacactcagggatgcacttgttgttgtgaatgacgtactggtggcagccctgcctccgcgagttcttgcatttgtggtgcaggtcctggcagaagctgaagttcacacagcgccagtcctggaagtggtagtacgggggcgggcaggtctccacacacctgccgtccaggtagaagttgcggcaggccacgcacttggtggggtcgtcgggctgagaacagttgcccaggcactcgctgtggcaacagaggccttcggcggtgcagccgtgtgacttacagatggtcgggcaaactggagagagagagagagagagagggaaataaataaataaataaataaataaataaataaataaataaatggctttgtccaattcctgtctgcatatgcagcaattctggatcagacagtgaaagccaaccaaacactaacagtaaaagcggcacgtctacatcattacccacatgtcagacacatctattaactggtttaagcctccaaaccattggtgagcttgtaaatgtttaacagctgcctgagggaggggcccagggaggcccagatttatatagcatttgccgatttccatggtgtaaatattcctaccagtggtggatttcaggccaccaacatgaagttactaaacataagctgacaaaagatacacagtagcattcctctaagtagtatttataagtatacacaaaatgtatctactattgacacaaaagtagtaaataacctcaacagcacaaataataggaaaacatcgtatgatattaggaggtggtgagttttgagtatttgttacttttaaaaagctttgttaatttaaaaacttttgtttttaatgtaatttgtttaactgtaggtttatgtaatttttatgaatatctatgtttaacaaatggctcacaaattgcctgaaaatttcaccactggctccagcaagccaactccagcatgctgctgcaccccacatgtgaagtagatacactgttagctcctttatttttttgttttacaaatggggaaactgaggtacagggaggttaagtaacttgcccccaaaccactgattgcttcaacagacatttgcttgcactaatctagatactgtggccactgtggggaaaaaagtggctgcagatcctgcctttgggagcacaaggtctaatggaggagacatgttagttacttaaacatgcaaatgtggctcggtgtggtggctcacgcctgtaatcctagcaatttgggaggtcgaggcgggtggatcacctgaggtcaggagtttgagaccagcctggtcaacatggtgaaaccctgtctctactaaaaatacaaaaattagctaggtgtgctggtgcatgcctgtaatcccagctgctcaggaggctgaggcacgagaatcacttgaatctgggaggtggaggctgcagtgagccatgatcgtgccactatactccagcctgggcaacaagtgcaaaattctgtcaaaaaaaaaaaaaaaaaagagagagagagacaaagagagagagaaaaggaaggaaggaaggaaaaaaaaaaggctggttgtggtggctcatgcctgtaatcctagcactttgggaggccaaggtgggcggatcacctgaggtcaggagtttcagaccagcctggccaacatggtgaaaccccatctctactgatgatacaaacaattagccgggtgtggtggtgggcgtctgtaatcccagctactcaggaggctgaggcaggagaatcgcttgaacctgggaggggaggttgcagggagccgagatcatgccactgcactccagccttggtgacagagggagactctgtctcaaaacaaaaaatgaaacaaaacaaaaaataagaaagaaagttggggagtgttcttcaccccaaatccccagactgtgattctcagcacagtggatcccaccggccaaactcagggaacagaagtggccccagaagctacatccatatatgaacagcaccatctggtcgaaatttctgcgatgacggaaatgttctctatctgggccatccaacatagtagccacttctcccctgtggcttctgaatgtgcttagtgcaactaggaaatccaattttttttttaattgtggtaaaatacacatagcataaaattcaccattgtaatcatgtttaaatgtatagttcagtggtattaaatacttttatgtggctatgcaaccatcaccaccacccatctccagaactttctcaccttaaccaaactgaaactctgcccccatgaaacagtcacactcatcctcctccccaactcctggcacctgccattttactttctttttcttttctttttttttatttttattttttgagatggagtcttgctttgttgcccaggctggggtgcagtggcgcgatctcagctcactgtaacctctgcctcccgggttcaagtgattctcctgcctcagcctccagagtagctgggattacagacgcccaccaccacacccagctaatttttgtatttttagtagagatggggtttcaccatgttggccgggctggtcttgaactcctaacctcgtgatcctcctgcctcagcctcccaaagtgcagggattacaggtgtgagccactgcgcccgacatcccattttactttctgtctctgtgactctgatgactctaggaacctcatataagtggaataatataggatttattcttttttaaaaaatttattttgagatggagtctcactctgtcactcaggctggagtgcagtgactcgatctcggctcactgcaacctccacctcctgggttcaaggaattctcctgcctcagcctcgagtagctgggattacaggtgcccaccaccacaccccgctaatttttttgtatttttagtagagacggggtttcaccgtgttggccaggctggtctcgaactcctgacctcaagtgatccactcaccctggccccccaaagtactggaattacaggtgtgagccactgtgcccagcctagctgcagtattttacattcccaccaacagtgtaccagggctccaatttttaccaaggaacaaaacttttaactgcatttcattttaatttcagtttaaaatttttaaaaagttttacattgatacagaatattttacacatttatggggtacttgtgatattttgtcatatggataaaatgtgtaacgatttcttttttgggtgtgtgatggggtctggctctgtcacttaggttctggggtacagtgacacagtgacagttcactgcagcctcaatctcctgggctcaggtgatcctcccacctcggcctcttgggtagctggaataatggacatgcgccaccacgcccagctaagtgtttaattttttgtagaaatggggtctcactatgttgcccaggctggtctcgaactcctggctcaagcgatcctcccacctcagcctcccaaagtgctgagattacaagtatgagccactgtgcctgacacaattccaatgtttactagccacagatgactaccgtctcccagacgagacagttcaggcatacagaataaaagccaactccctacaggccttggggggtctaatccctgccagtcttgctaaattcttctcccaggctggcctcctttctgcacctcccacccacacacacccaggctcagccctaccttaggaccttgcacaagctgttctgggtggagcaccctggtcccttgtccccttgtgacttgctcctttgcatccttcaggtccttacacagatcttccctgacttccccagcagaagtcgcccttcctgctccattcataagctaacacattatctcattacattttccttatggcatggatcactcttgaaaattatcttggggctgggcgcgggggctcacacctataatcccagcactttgggaggctgaggtgggtggattatttgaggtcaggagttcaagaccagcctggccaacatggtaaaaccccgactctactaaaaatacagaaattagctgggcgtggtggtgggcgcctgtaatcccagctactcagctactcagaaggctgaggcacaagaatcacttgaacctgggaggtggaggttgcagtgagctgagatccactgcactccaggctggctgacagagtgagactccgtccaaaaaaaaaaaaaaaacaagaatattaggaagttctaatagggctaagcacagtggctgatgcttgtaatcccagcactttgagaggctgaggtgggtggaccacttgaggtcaggagttcaagacgaccagcctgaccaacatggtgaaacccgtctctactaaaaatacaaaaattagtcgggtgtggtggtgcttgcctataatcccagctactcgggaggctgaggcagtagaatcgcttgaacgcaagaggagtttgcagtgagtcaagattgtgccactgaactccagcctaggtgacagagcgagactctatctcaaaaaaaaaaaaaaaaaaaaaaagggaggggggattgttaataagagtcccttccttccttcttaaggctgttgcaagaaataaacaggatgacgtcagtaacacatcagattctttgatagagacatttttaggcttgatagaaattaactacagagggtatctataattatcataattatcaacatcattaacactgatctgtctgtgggaacctgagggctgaaattcaattgaaggaagcaatatacaaggcagacaacaatgatccaggacccacggagttccagcactctggcaaggaaacacacacacaagaggaaggggcttgtttcctgggctggagccacttcagagggtcagccctttcattcaaaagaggcgtcatcaatggcctaacacaaacctctcaaacacataagtccttccggcctagacaatgggaagaaaaattatccaaccattgcaaacaaggccagaggctgcgagactttgcaatcctgtgttggagccctagctgacaggcctatctgagctatttcatttgtcagcacaggagttggtcaactttttctgtaaagggccacaagcaaatacttgaggctttgcaggacatatggtgttggttgaaactactcaactctgccacgatggcatgatagcagccacagacatatgtacatgaagaggcatggctaggtccaataaaactttatttataaaagcaagtgatgggccagatagtttatcaacctgcactagttaaatgtacctgtaattgattttactattactttttttttttttttttgaaaccgagtcttgctctgttgtccaggctgaagtacagcggtgccatctccgctcactgtaaactctgtgtcccaggttcaagcaattctcctgcctcagcctcctgagtagctgggattacaggcacccacaaccatgcctggataatttttgtatttttagtagagactgggtttcagcatgttggccagtctggtcttgaactcctgacctcaagtgatctgcccaccttggcctcccaaagtgctgggattataggcatgacccactacgcctggccgattttactatttctattaggaactagactcaaggaaattagagttaacttacagacagatatgctacaaattattttcatctcagagaaaagatactctcagctgggcatggaggctcatgcctgtaatcccagcactttgggaggctgaggcgggaggattgcttgagcccaggcattcgagaccagcctgggtaacagagtgagatcctatctctccttgccgaaaaaaaaaagaaaaaaatcatccccaaagattacagttttattgtcctatgggacattaagcagcctcacagctaacactgccttcttatttcagtgactatacatgttttggctttataatcctgctgttccctcactaatgggttaaataaacatgctgacctgtgttctttggtggtttttttttttttttttttttgagacagagtctcactctgttgtccaggctgaagtgcaatggtgagaactcagctcactgcaacctccgcctcccgggttcaagcaattctctgcctcagcctcctgagtagctgggattacaggcgcccgtcatcacgcccagctaatttttgtatttttagtagagatggggtttcaccacgttggccaggctggtcttgaactcctgacctcgggatccacccatcttggcctcccaaagtgctgggattacaggcgtgagccaccgcgcccaaccaattctttgaagactatccttcgaacactataagctcattccaggtgtttccaactctgtagggagatgttgatcaaactacaaaatttcacttaggagaaataagctttagttatgtattggacacaatggttgctataataagtaatagtgcactggacatttcaaaattgccaaaaatgtagatatttttaaccataaaacaatgataagtatgtgaggtgatagcttttaaattggcatgacttagtaattctacaatgtaaacagatatcaaaacatcacatggtaccccataaatatgtaacatatacaattattatttgtcaattttaaaaaaatagaggctgggaacggtggctcacgcctgtaatcccagcactttgggaggccgtggcaggtggatcacctgaggtcaggagttcgagaccagcctggccgacatggtgaaaccccatctctactaaaaatacaaaaattatacaggcgtggtggcaggtgcctgtaatcccagctacttgggaggctgagacagcagaattgcttgaacccgggaggcgggggttgcagtgagccgagattgtgccactgctggaagagagagtgagactctgtctcaaaaagaaagaaaagaaaagagaaagaaagaaagaaaaagaaagaaagaaagaaagaaaggagggagggagggagggaaggagggaaagaaaagaaagaaaagccactcggggtggccactgcaccccctagctgagtgggagtcctctaaactggtgctggacgtttccacatactcttgctccccatactggttcctctgaactcggattgttagacagaatgtgaaaagctccacatgaaaatcacaagcctgccaggcgcagtggcttgtgcatgtaatggcactttgggaggctaacacgggaggatctcttgagtccagtagttcaagactagcctgggcaaaatagccagacccctgtctctacaaaaataaaaaaattagccaggtgtgatggtgcacacccgtaaaccaatagtcccagctactcgggagactgaggtgggaggattgctacagcccaggggtttgaggctgcagtgagctgtgactgcaccactgcactccagcctgggcaataaagcaagaccctatctttaaaaagaagagagagagaaaagaaagagagagtgaaagaaggagggaaggaaggaggaagggagagagagaaaagaaagagaaagacagaaagaaggagggaaggaaggaaggaaggagagagataaaaagaaagaaggagggaaggaaggagggagggaggggagagagagagaaagaaagaagagggagaaagaaagagaaagaaagaggcaggaagggagggagaaagaaagaaggaaagaaagagagaaagaagaaagaatacagaaagagaaaaaagaaaagaaagagggagaaagaagaaagataagagagagagaaagagaaagaaaaagaaagacagagaaagaaaagaaaaaagaaagaaaaagaaagaaaggagaaagaaaagaaagagaaagaaggaagggagggagggaagaaaagaaaagaaaagaaaagaaaagaaaagaaaagaaaagaaaagaaaagaaaagaaaaaaatcacaggcagcccaggctggggaaagggcatgacacagatgaactagccacaaaacagcagcttcttctggtgagagagaccgcaaagtgaagacattatgaaagccacgtgtcatgcaagatgagaaacagccccagtggaggacggggttgactttcctctccctgtgcccctgacctgatccccctcattgacacgtaatgagcccaagtgtccgttcctgcccaaattctggtttggggtagggacagtcagcagcccaggctatgtctgccagacaagatggcagacttgcaggaaaatgccaaaccgtccgggggctgtcactccctcacacctgcacacaagtgctgctgtgtatgtagggaacatctacccagacctcccctctccaaaaatgcaagttctgtgtccatccgctgtctccccttcaaagccacattgagctgctggtcccaattttcccccagttctccctaaacctcccaaaagctcctgggtgagcacacagaagcaactatcatcttcctgaaactttcagctgcggtggctttttcactatacactgctgagaagatcagggactaaaatctaactaagttgacggaggagaaaggagaccgctgtgtcagagtcctctggtggaccctccccaagaaagacaatgtccccactaaaggaccccttccctagacagagggagtcacagaaacaccaatttgcttcagggaggcagttcaaagcaaaggaacgaatcttgcaccaagaggcaagtgcaatttgatgcagtatttcttttttttctttttttttttttccccagatggagtctcactcttgtccctcaggctggagtgcagtggcacgatctcagctcactgcaacctccgcctcccgggttcaagagattcttctgctcatgcctgtaatcccagcaggctaaggaggctaagcctgggaggctaaggtgagcggatcacgaggtcaggagagccaaaccatcctgaccaacatggtgagactccgtctccacgaaaaatataaaaattagctgagcatggtgtcgcgcacctgtagtctcagctacatgggaggctgaggcaggaaaatcacctgaacctggggagcggaagttgcagtgagctgagatcacgctactgcactccagcctggcgacagagtgagactccatctcataaaaaaacaaacaaaaaaattaggggcaggaggggggaggacacatgggacatatgtccctctgaaagggacacaaaaaagtgccctattttatttttattttttactatgtatgtgtactatcctgtcaaaactgacatatatttggaaatacatatttttttcaagtagcttcttctttcatttatttatttagagacagtgtctcactctgtcgcccaggctggagtgcagtggcatgatcttggttcaccgtaacctccgcctcccaggttcaagtgctcctcctacctcagcctcctgagtagctgggactacaggcgtacaccaccatgcttggctaatttttgtatatgtatatatacatttggtagagatgaggtctcacaatattgcccaggctggtcttgaactcctaggctcaagagatccgctctccccgagctcccaaactgggcataggcgtaagccacaatgcccagccaggaaatacatttttcaaaagcctctgctagacagtaaacaatgttattgatcagttacatgattctactcccaaatattctaataatgacaggcatcggtgagagcttttacaaaggttctcttaaaatcatctttgttggctgggcatggtggctcacgcctgtaatcccagcactttgggaggctgatgcaggaagatcacttgaggtcaggagttcgagaccagcctggccaacatggtgaaacactctctattcaaaatacaaaaattagctgggcgtggtggtaggcacctataatcccagctacttgggaggctgaggcaggagaattgcttgaacccaggaggcagtcgttgcagtcagccaagatcgtgccactgcactccagcctggacgacagaatgagacttcatctcaaaaaaagaaaaaaaaattatctttgccttattacaaaatcaatatggggctcaggggtgaagtgtggagtgtgttttaataatagctttgcttttttttttttttttttttttgagacaaaatctctttctgtcacccaggctggagtgcagtggtgcaatcttggctcactgtaacccccatgtcctgggttcaagcgattctcctgcctcagcctcctgagtagctgggattacaggcacacgccaccacaccaactgattttttttttttttttttttttagtggagaagcggtttcaccatgttggccaggctggtctcaaacacgtgacctccgtctgccttggcctcttaaagtgctggtacaggtgtgagccaccgcgccaggccagctttgctcttttatggactattcaacaaattgttagcatttctcttttttctttttttcattcaacaaacacatgtcgaatgtcccagtgtgccaaatcataggaaacctgttctcgtattaaatgaaaaagcatcagaacatagatgacacaaaaaccccatcccctgtcctcgagacatccaggtttagcattgtcctcagcccccagcagcatcccctcctgcagggggaaaagaaaaggaaaaaatcccacagtactagaaaatggcaagagtaaatcttgttgtgggaaacttttcattcaggtatatgcatgtcttgggtactgagccttacgggaaatgtatttcttcttaaaaattctagttaaaaatacttcaagtaacattgcccacaatagtgggacaaggcaacaacacgtacttcccattatgaggcaatgaaaaagacaaaatatttgtgtagctttctttccatatattactaaccctagcttgaggtcattcgataaaataactggcctgtgctcttcaaaactgccaatgttggccaggtgtggtggctaacacgtgtaatcccagcactttgggaggctgaggcaggaagatcactggagatcaggagttcgagaccagcctggccaacatggtgaaaccctttctctactaaaaacacaaaaattagctgggtgtggtggcgcatgcctgtaatcccggctacttgggggctgaggcaggagaatcacttgaacccaggagacagaggttgcagtcagccaagatctcaccactgcactctagcctgggtgacagagtaagactccgcctcaaaaaaaaataaaaataaataaataaataaataaataaaagccaatgttgggaaagacacagaaaactgaggaattgtgcggacttaagagacagcagcattcaaatgcaaagtgtgatcctagattggaaccttcgcctaggaaaaaaaatctatatagggcaatattgagacaacagataagattatagaagacattggattaaaatactgtatcaatgttaatttcctgattttgacaacggcaccagtaccatcattatgtaagagaactttctttcttttctttctttttttttttttttttgtttgagacggagtttcgctcttgttgcccaggctggagtgcaatggcaccatctcggctcactgcaacctctgcctcccaggttcaagcgaacctcctgcctcagcctcccgagtagctgggattacaggcatgtgccaccacgcctggctaattttgtatttttagtagagacggggcttctccaagttggtcaggctggtctcgaactcctgacctcaggtgatccgcccgcctcagcttcccaaagtgctgggattacaggcatgagccaccacgcctggcctcagaactttcttgttcttaggaaatatccactgaagaattaaggagtatgtatcatgcctgcaactaactctcaaatagttcaggggaaaaaaatgtatataatgtgtgtgcataaatatattagaaaggtaataaaacaagtagaataaaacgtaaacaattgattgatctagatataatcttgcaatttttccgtaagcttgaaacgacatcaaaacaaaaagcgaccaatttgtccaaagcaaggttaaaagccagagaaataggagacgcagcgctgcattgttaaatgacttgcgcacaaaaatccagtcactctgacacttttttgtttgcctcccttttaaagttcaaattagtttgggtttttcttaattaagaaggtatgtgataaaaaacaaaacagaaaatacagaaaccaccattaaatgattcgatagctccacatatgttaataacattttgttacattctttccaaagcttaaaactttccgaagtttaaaaaaaacttaaaaaaaaaaagtttaaaaacctttccaaagtttaaaaaaaaaatactcaagatttatgattccaaaaattactgctttccagaaatttccaaacggaacagttgcgtcatgggcctgctggtacattgaccacagggccccgcggctctccctataagtgtgagttttataaactccttaaagtaatttattttgtttccattcaaggcctttctctcccacactggccccagaccctgacctcagaggttcgagtccccggagccaaattcctctagttggaatctagtaaatgatttaatggcaaaggggcaggggttgggggcagccaaggaggtgaacttttgacagcttcgtggtcagcagcgacgaccgcaggagcgcgtgtccttgaagcggggaagcgccccttttccttgcctgacaataccgccccacacgcgatgacgcctttggaatagaactgcgcagctctttggagacatacggcgcatatagaggctagaaagggaacagagtaccagagggccttcccgcttcgggagccgcaggcttcttctcttcggagagagagtgagtgagtgagtaagcgagtgagtgagtgagtggggagggagtgagtccgtccacgggggcgggccctctccatgctgcggatctcttaggagatatactgcgcacgcagaggcccggaaggaggcggggtcccaggggtctcctcgctagagcagccccaggattggcaggttccagagtgggagtgggggtgtgtgtgtgtgtgtgtgtgtgtgtgtgtcaggttccagagtgggagtgtgtgtgtttgggtgtgtgtgtgtgtgtgtgtgtcagattccagagtgggagtgtgtgtgtgtttggcaggttccagagtgggagtgtgtgtgtgtgtttggcaggttccagagtgggagtgtgtgtgtgtgtttggcaggttccagagtgggagtgtgtgtgtgtgtgtgattggcaggttccagagtgggagtgtgtgtgtgtgtgtgtgtgtgtccccaggattggtcggttccagagtgggagagagagcgagagagagagagaacgagagagagagagagagaacgagagagagtgtgtgcgcgtgtgtgtctgtgcagccccaggattggtcggttccagagtgagagtgtgtgtgtgtgtgtgtgtgtgtgtgtgtccccatggtgggagtgtgtgtgtgtccccatggtgggagtgtgtgtgtgtccatggtgggcgagcgtgtgtgtgtgtccatgatgggcgtgtgtgtgtgtctgcgtgtgtgcccgtgtctgcgtgtgtgcccatgggggcgagggagggagccctaggcgctcaaggctccgccccctcgagccggaggcctcagcgcagcacaaagcccggggcgcactccgctccggggaatccggccccggcggttgcggcggccgcagcgccgccctcgcgctcagccaatgggcgggcgtgctgcaggggcgctggccccgccccccgggtgcgccgggctccgctccccagactggcgctcgggcagtggccgccgccgggcggtcccggccagaggaaagggcgccctgggagggcccctcgtggctgcagaccccgcaggtcgagtctgccacggatggaactttggaaaaagctagggaaaaggagaaaccgagcttgcaagggctcatcaagcatccaccggggtggcttaggctgcgcgcggcgctgggcgtgtgcccgggaggagatcgggtcaccgcgtggcagctcccgggactgccgaggggccccctgaccccaggcctccctcgggaggggtccagaaaggtgcagcggctcactagggtcacacagcaaaattcctcacattgcagggggggagggtccgcatctccgaactcgccgggccagtgcaccctctattctcacccaccactcacccagaaaacgagaaccatactcataaatacattcttaaaatccacaggctacgtttttggggtaacctccagccagtattccgcatgcatttgaaaacttgtgtgtccccattgaatttgcagttccagtaaaccaaggcagcgagtggacattctcatttaacattcacccccataaatacactttttttggggggggggtctcactctgtcgcctcaggctggagtgcagtggtgtgatcatcgcccactgcagcctcaaactcctgggctcaagccatcctcccacctcagcctcccgagtagctgggactacaggcgtgcatcactatgcctggctaattttttctatttttttgtagacatggggactcgttgcccaggctggtttagaactcctggcctcaagtgatcctcttgcctcagtctaccaaagtgttgggattacaggcatgaatacactttaaagtgtgtaatctgtttgcagcacacacggtccaatccatcaatgaggtcatattaactcaattattcaagcaatcatcaccattagaattggagaaaccgaggcatagaggggctactttgccaataaccagctctgccagaactcgaatccaggtctcccagagagaccaggagagggtgtggtatggagtttgggggagtgggagtttgtttgattttttaaatttgtttgtttgtttgaaacagggtcttactctgtggcccaggctggagtgcaatggagccatcatagctcactgcagtctaggactcctgggctcaagtgatccttccgcttcagcctcccaaggagctaggactacaggagagtgccactgcgacagcttttttttttttttttttttttgagagcgggtctctctatgttgcctaggctggtctcaaactcctggcttcaagcaatcctcccactttggctccccaaagcgctgccatcacaggcgtgaggaacccagcctggctgtaacacggcatcacactgtgagttatgtttacctgttccctacctcgacccacccagatctgacaccctcttggcattggaatgcagaaatgaatggagaccctgtccctgccctcccagtatgcacgagacacatacgccccgtgaagggaaagatgtgtctgtcttgcttattacagcatcccagagccatacacacagtaggtgcataataaatcttgtaggaaaaaaaaaatgcaacggaggggcggggattaggtgactgtccctttatcacagcaggagaggaacagtacatgcaaatgtgtgaatcactcgggctatgttcagagaactataaacagttcagagttgatgaagggcaaagtacaggatgagaggaatagaagattagaccagagaggaaagacagggaaccaaggggcttggactttaccccacagcagaagccaaagaaagatgtcaggcagaaagaacaccatcggattcacatttgggggtcatttttctggcttatggtagatggatgaggaagttgagaggcagaggaaacagaaaagaagaggctggcttctgaagccatcggggaggtggaggtgtcaggacttacctgctggatgacgcccaactttccaccttgggcaactggatacaactcacgagagaaacagcaaaccaaaaagacaggtgctcacatgtggacaatctgggtttgaggtgtggagttcaagatatagaggctgcactttggaggctgaggtgggaggattgctggagcctaggagttcaagaccagcctgggcaacagagcaagaccttatctctttaaaaaaataataaataaaaaattaaaaattagctgggcatgatgatacacaagtgtagttccagctaatggggaggctgaggcaggaggattgcttgagcctaggagttcaagaccagcctgggcaacatagcaagacctcatctctatttcttaaaaaaattaaagattaaaaaaaataaaacttagctgggcatgatgacacatgattgtagttccagctacttgggaagctgaggcagaaggattgctcgagtccaggaagttgaggctgcagtgagctaggatcacgccactgcactccagcctgggtaacagagtgagaccttatctcaaaaaaaaaaaaaaaaaaaaaaggctgaagagccacacttccacacaaaaatggttgtgtttgtggttgccgagtcacagctctaaccactccggcttgctccagaaagctactcatggcaaggtgcaaaaacccctgtttgttgggggcattttggaagtttttattctcattcatgtaggcaatacacattttatgcaattaagtacaggagtaactttttacaagttgttgagtttcaacctattgatgtttcctgcattttgagtccatataaattttacaggctatttagaaattactgataataagagagtacagcttatgagagagaatggcatacccattctctggggcaaattcagagcctcaatttctggtaaagagaaacaattaagctaaataaaagtaacacttgaatcagtaaatgaagttatttttaatatttccaaaattgttagtagagctgtctttacaattttttatggatttaaatgacatctgtttttaatcccagcactttgggaggccgaggcgggtgtatcacctgaagtcaggagttcaagaccagcctggccaacagggtgaaatcacttctctactaaaaatacaaaaattagctgggtgtggtggtgggcgcctgtaatcccagctactcgggaggctgaggcaggagaatcgcttgaaccctggaggcagaggttacagtgagctgagattgtaccactgcactccagcctgggcgaccaagtgagactctgtctcaatcaatcaatcaataataaataaattacatctattttcattctttttttttttttgagttggagtctcactctgtcgcccaggctggagtgcagtggcgcgatctcggctcacggcaagctccccctcccgggttcacgccattcccctgcctcagcctcccaagtagctgggactacaggcgcggccaccacgcctagctaattttttgtatttttagtagagacggggtttcaccgtgttaaccaggatggtttcgatctcctgacctcgtgatccacccgcctcggcctcccaaagtgttgggattacaggcgtgagccaccgcgctaggccttcattcttaattttatctacaatatttgttctctccccctcctttgtcttagtttttctgttttattgattcctccctctaaaacagcactgtccaacaaacgttcagcagctatggaaaagttctgtatctgttctatccatttcagtagtcactaaccatacatggcccctaagcagtggaaacttggctcgtgcgactgagaaaatgaatttttaatttaattttcacgtgggttgtggccaccctactgagcagcatctctctaaaagatccagctttttgattttgtcagttctatttgttttctaatcagttcgtctgtgcttattatttccaatattcatcatctcatttttgtgatttctctctatattcatataataaattatcaagcaaatttcctctataatcatttaaacctctgcctttgtctccatgttcacatcattgtcatcttcaaatagtctatccttgcagtgtttcgatcctccaacttaagacttaggggttggttgtttttttgttttgttttgtgttttttgtttttttgagatggaggttagctcttgttgcccaggctagaagagtccaatggcaccatctcggctcactgcaacctctgcccccggggttcaagcggttctcctgcctcagcctcccaagtagctaggattacagggtatgcgccaccaccctcagctaatttttgtacttttagtagagacggggtttcaccatgttggccaggctggtctcgaactcctgacctcaggtgatccgctcgcctcggcctcccaaagtgctgggattacaggcgtgagccatggtgcccagcccttttcggtttttttgtttttgtttttttggttttcattttctttttaattatcaagtggtaggagtctctcttacatgcttgttcagttaagcttttaaaaattaattccagttatgcttacttgcagccagagattagaacccgtacaatgtctgcttttttggaatgtattggtttggggtggggttttgttgttttttttttttttttttcagatttaacagatgattgatttttctaactattccaagagcactttaaaatgtatattgtttgcagagtgcaaagttcagtcctatctgttaccacaatcttattaaccatgttattcaaactttttgttacctgagtctcatctcccagatccaggctgtgttggagtcttctccgaagtttctccttgcatttccaacaatttgctctctacagtttaattctattctaggtgaccctcaactcattaaagatcatcccttcaaaccatgcaaaagctctccctctctccctgaaaacgcctcgcgccttgaattctttgcttatttttctctgttcaaatttagccacacgttgaagttttctgtgtcatttttggaaataggtatgacaatctgtaagcggcacagagagagagaaccgcagcctccatgggaacgaggaagtgggaacgggatgagagtttggaatcgatctccgtggaaggtctgaattgcaaggcgggtttccctggggacaatctcaaccataaaaaagttctgctcacatgactgatggcttttcaataacaagtatatggcggtcttgaatgtgcacaggttgacagttttcccgggagcttctacatgcacgagctggcagagtctagggacagggacaaggaatggagaaaatttcctcaactcctgaaggacacaggtgcccatggggacgtactgaatttctgcagaggcaccgtgaaacagaatcataagtcagaaggaaaatgcacctatttcacattccatcgtgacaaaagggagacgacttttagcttacctcctgattctgcgggttcctaaaagccaggatgactgctttaacttttatattttattttatttcagatggagtttcactcttgtcacccaggctggagtgcagtggtgtgatcttggctcactgcaatctctgcctcccaggttcaaggaattctcctgcctcagcctcctgagtagctgggattacaggctcccggctcactgcaatctctgcctcccgggttcaagcaattctcctgcctcagcctcctgagtagctgggattacaggctcccggctcactgcaatctctgcctcccgggttcaagcaattctcctgcctcagcctcctgagtagctgggattacaggtgcccagcaccatgcccaactaatttttttttttaattttttatttttagtagagttggggtttcaccatgttggccaggctggtctcgaactcctgacctcaggtgatccacctgcctcggcctcccaaagtgctgggattacagacgtgagccaccatgcccagcctggaatgactgctttattttcccctctataagttacgagagtcttcgtgtgtcatctccatgccaggagcctcatggcctcgttttcccggggggccactccccgtgtatatacctcagacactgctattctattagaaaaacatgtgaagttctctgattgggggaaagatccatttcctgctcatgttgatttcaacaaaagaaaggaataagtttccctctggatcctcagacttcactggctaatcaagacccaccttgcagctgctctttgtccaccagagcaaacagcccagatacctggaacttcccagttctacctggatttatgctactgagccctggcacctatgcggggaaaatgcaataaggaaaaaaaggacaaacaatgctcccctatcaggctggctgctgaacatcatcatgtaagaaagatgggtagagccgggcgcagtggctcacgcctgtaatcccagcactttgggaggccgaggcgggcagagcacttgaggtcaggaactcgagaccagcctggccaacatggcaaaacctcatttctactaaatatacaaaaaaaattagccgggcatggtggcgggtgcctgtcatcccagctgcttgggaggctgaggcaggagaatcgcttgaagccaggaggcagaggttgcggtgagccgagaaggcaccactgcactccagcttgggcaacaaaagtgaaacttcatctcaaaaaaagtttactaggcagcaaaacacctcctgttgcttgtcccattctctagtggcttctatcaacagatctgagctcctacggagtgtccggcaccatctgagctccagatacaagctaatggttagaacagacctttccacagcctagagggtagacagagagaaatctttagcactgggcatgcaagcacatttcgttacaaattgtgaccatgctccaatcaagttcacagggggctgaaacgcccgggttgttaatttcctcagaaggttattctataaaagccaaagtgttactttcttgcattgagaaaccagagcaccaaatgccaactttctagctcagttctcaccttccttcctcatgtctgccatgcaatcaaactaaggaacggatggacagccagccatgcctgtcagtcccgcagtagccaggcctaagatggggacagtaggaggagcgtggagaaattctacattgtccaaatctgctctcttggcttcctgcagtggctctctcatgcctgtaatcccgatactttgggaggctgaagctggaggatcacctgaggtcaggagttcaagaccagcctgggcaacatggcaagacccctcacaccccccacgcccatctctacagataatacaaaaattaggtgggcattgtggtgcacacctgtagtcccagctattcgggaggctgaggtgggaggatcaattagcccaggaggtcaaagctgcagtgggttatgactgcatgacagcactccagcctgggtgacagagtgagacactgtctgaggctctcccatcagacctgcgagccacagcttcaatagccagcacgtggagtgcaaggacttatggtatcaggtcgacctgagtttcgagcagacacagctacttcctggtcacatgagtctgctttctgtgcctcggtttccccatgtgcagacgggaaccatcgaagtaccttgggctgacttgaatactggaggggatgacgcacaaaatagcactcacaacttcctttatttcatgggaagagagggttggatggattaaaccaggggtcccccacccctcagggagttgagagacagaatctcattctgtaacccaggctggagtgcagtgggtgtgatcatagctcactgcagcttctacctcttgggctcactcaatcttcccacctcagcctcccaagtagctgggactacaggcacacacttgtgatccacactcagctaattttggtattttttgagcagacggggtttggccatgttgcccagtctagtttcaaaccagccagttaggaaccaggctgcacagcagtggacgaggggcgggcgagcgatggaagcttcatctgtatttacagtcactcctcattgcttgcatgaccatctgagctgcgcctcctgtcagatcagcagcagcattagattctcctaggagcgtgaaccctattgtgaactgtgcatgcgagggatctgggttgcacgctctttatgagaatctaatgcttgatgatctgtcactgtctcccgtcaccaccaaatgggactgtctatttgcaagaacccaggaggaggaggtttcagtgaacagagattgcaccagtgcagtccagcctgggtggcagagtgagaccctgtctcaacaacaacgaccacaacaaaaacaaacaaaaaaagagtcatcaaggaataaataaaacgggtgacacgctgtttttctaaagcccaaatatcacgttgtcaaccacacttcctgatgacatctaaatcccctttgaaactgcttggaagtttctagaagagctcatccacagtaacagaacactcaagtctaaaagggaaaacacaaaatccccaattttcctctcagaaatcaagatttaatagcctcctaaggaaaccataatttgagggccattgggagcattactctctgaggcctgtgattatagaatgccgagaatgattgggaacttgaaccaccagtgaatttgggctccaactaaaatgaatgagacccgtggccaggcacggtggttcacgcctgtaaccccagcactttgggaggctgaggcaagcagatcacctgaggtcgggagttcgagaccagcctggccaacatggtgaaaccttgtctctgctaaaaatagaaaaattagccaggcatggtggcatgcacctgtaatccccagctgctcgggaggctgaggcaggagaatcgcttgaacccgggaggcagaggttgcagtgagccaagatggtgccactgcactccagcctgggcaacagagtgagactccatctcaaaacaaaacaaaacaaaacaaaataaaaaattaaaatgaatgagacccaaagcagaaggtataccaaagccccctcacccacacacagacactaagaggaggctggggagggctcaaggaagttggaaagagggaaaatatcacgagaataaagcaaccatctcaaaaaacaacatgagtttccccacttatgtctccctagcctggctaaagaaaggagaatgggccgggccagtggctcacacctgtaatcccagcactttgggaggctgaggcaggaggatcgcttaagaccagaagttcgagacaagcctgggcaatatagcaagacccatctctacaaacaagtttaaaaactacttgagggcctgaggcaggaggatcacttgagcacaggggtttgaggctgcaatgagctatgactgtgccgttgcactctagcctgggtgatagagtgagaccttgtttgagaaggaaggaaggaaaggaaggaaggaaggaaggaaggaaggaaggaaggaagggaaggagggagggagggagggagggaggcaaagaaagaaaagagttacaaggagcttggccttgggcatggaaagggatttgtggttaagagctggcccctcttccagcccttgtaccccccagaaaaccacctcgtgtttggctcacgaacttctgcttcttggaactcatctaagtcaaagacaacaacaccctctgagatgctactgacctcatgccacgtaactattctgtggctgccaggaggaaccgcccactcgctcttcttgggtttactcctaattccacgcccacctcaccttgaacttcccactttgaaatctaaagatcaaaggtgtttcttggttctcacatagaaatcccccccttgaacttccttcctatctgtttcctcagcctatcttccctctggccgtgtattattcacaaagagttctacaggatacaaagataaaatttaatgtactttccttagcaaccggaaaaaaaaaatccctgaaaaattaaacagcagatacccaaatagaaactttgctttagaaaaatgggatttgaccacacacacgtgcacaggccacacaaaccgtcataaccttgaccagcttaagagaacaattctcaagccagtgagaaaacaacagctgtggccgggcgcagtggctcacacctgtaatcccagcactttgggaggcccaggcgggtggatcgcttgagcccaggagctcgagaccagcttagataacatggcaaaaccctgtctcggctaggggtacaaaaattaggctgggcgcagtggctcacgcctgtaatcccagcactttgggaggccgaagtgggcggatcacgaggtcaggaaatcgagaccatcctggccaacatgcgaaaccccctctctactaaaaatacaaaaattagctgggcatggtggcgcgtgcctgtaatcccagctactcgagaggcagaagcaggagaatcgcttgaacaggggagttggaagttgcagtgagccaagatggcgccactgcattccagcctggcaacagagcaagactccattaaaaaaaaaaattagctgggcatagtggcacatgcctgtgatcccagctactcaggaggctgaggcatgggaactgcttgaacccaggaggcagaggttgcagtgagccaagattgtgccactgcattccagcctgggcgacagagcaagattccatctctaaataaataaataaaattagctgggcatagtggcacacacctgtggtcccagctactcaggaagctgaagcaggaggattgcttgtgcccagaaggtcaaggctgcagtgagctgtgatcacaccactgcactccaggctgggtgaccaatgcatcgctctcacctctctccaggcagcctgcagaagccagatatttatttgaaacctccagcttctgctcctcatgtgtatgcaaacgttgagctcaactccataaaagtcatgttttgttttgttttttgttttgagacagggtctttctctgtcacccaggctgcctatcacagctctctgcagcctcgacttcccaggcttaactgatcctcctgcctcagcctctcgagtaactgggattataggcacacaccaccatgcccagctaattttttttttttagagaaggggtcttgctatgctgcccaggctggtctcgaactcctggattcaagcgatcctcccgtctcagcctcccaaagtgctgggattacaggtgtgagccatgacgcctggccaaagtcatgtattttattccataatagatgtacatgagggtaaaaataacacttgactaatgtacaggttgaaatacagaacatttgcaccacccccatctttgaatactatttcatccaccctactccaattccaagagcaatgtcgtgggtgtcttagcaatcaaggatagcacctccagaacaaaaacgctgtgaaagtcaaagagaagttctgtttatactaacaaagggctggaaatgtctattggttgtgggttgaataagtaaattccaaatgaacgtgaccacagaagaaacagagattcaaaatgacccccaagaagtattactaagggagaacgccaagagccaggcgcagtggctcacacccgtaatctcagcactttaggaggccgaggcgggtggatcacctgaggtcaggagtttgagaccagcctgatcaacatgggaaaaccccatctctactaaaaatacaaaaattagtcaggtgtggtggtgtgtgactgtaatcccagttgctcgggaagctgaggcaggagaatcgcttgaacccaggaggtggaggttgcagtgagccgagattgagccattgcactgcagcctggtcaacagagactctgtctcaaaaaaaaaaaaaaaaaagtaaacaagagtgtctcctctccataaacaaattaacaggagaaactcagccccactaaaacacacacaaatttaggaaattgacaaaaacctaagagctgagaaaatatgggttctggagtctcagtgtttggcatcaagtcatggctccactttctcctcgctgtgcgactcctggaggggaacctagtgtgcctggtcctcagtttccctgtctgtagaatgggctgggaaaaactatgcagattcttggaaccagggtgacacaagcaaggcactggcctctggcataaaagttaaggcgtgccaaaaccgtcttcaagataagttatatatataaatatatatgtatatatggagagagagagacagagacagagagacagagagagacagagtcttactctgtggcccaggctggagtgcagtggtacagtctcagctcactgcagcctctgcctcgcggtttcaagcaattctcctgcctctgcctcccaagtagctgggattacagccacccaccaccatgcccagctaattattatatttttagtagagacagggtttcaccatgttggcgaggctggtctctaactcctgacctcaagtgatccgtcctcccaaagtactgggattacaggtgttgatcaaactgttcttgatacaatcaggtaattccagaaaaattgtccccttggggcctgcttgttagttggctggtttgtttgaaagaggatctcgctcagctgcatgggctggagtgcagtagcaagtcacagctcactgcagcctcgacttcctgggcttaagcgattctcccacctcagcctcccatgtagctgcgactacaggtgcatgtcaccatgcccagctaatttttatatttgtagtagaaataggctctttctgtattgcccaggctggttttgaactcctggcctcgagaattcctcccaccttggcctctctaagcaccaagatgacaggtgcgagggaggcactgcgctgtcttatttagcaataagctacattccattttcaggaggtgacgctgtcatcccactgccagtacaatccaggtaaggatttcactccatcctctgtgttttccaaaggagccggtatttgaaaaggacgtgcattccaccaagcattcttaacgacctgggcctttggggtcaggtaagttccagattttattattagtaacaaattaaattgactaacaacaaaagaaaagtgcaccatcaatgacccctcaggaaccaaaacatgcacaatcccattgacacagggacagagtaaactgctcaacagctgactctactcccacagactgaaagctgcagggtcagggccggcagccgcggagaaggaagctgtccccgtcaacacggtctggaacaatccacaacgcttatcaggggagataccacaggcaagagggaacgaaaacacttcttctgccaaatagagctttggagggaatatcggtttgtctggggcaggactgggtcacgggctacacgccttctccttgtattctcacgaattcaacacctggtaatgccggggccgtttcccaagtcacagactcagactctggggtggataattcccccatcactgttatcttaaagtagggtttctcagcctcaggactggtggtattcagagtcggatcttcatctggggaggggccgtcttgtacattgcagggtgctgagcagtatccctggcctccacccactccatgtcaggagcatctccccccaccccgacgtgtgacaaccacagatgtccccagaaatatccagacccaccctagggtgagaaccacttggtgagcgagactcttgccagagccagagggaaatcatcaaagccgatggggctgaaatggttaagttggtccatctgtctgtctgttcatcaggccctgatttatagctttgggggctccagcaccccattcccctggcttccccacagtcacactgccattccccatcatccccgggacccaagccctgcgattcccgctcagctcccacctagcagacacatgttgaatcgaatgcccattcatctgtccaagatttgctgagggtctgccatgttttggaggcgcttcaatagcgacaagacatcgtggaccttgacctcatggtgcttccagtctagcaggcaggcaggcagaatcagagagaaaatttttctttaaatttatttttgggtttttttgagatggagtttcactcttgttgcccaggctggagtgcaatggcatgatctcggctcactgcaagctctacctcccgggttcaagcgattctcctgcctcagcctcccaagtagttgggactacaggcacccacccccacgtcctgctaattttttgtatttttagtaaagacggggcttcaccatgttggccaggctggtctcgaactcctgacctcaggtgatccaccaacctcagcctcccaaagtgctgggattacaggtgtgagctactgtgtccagccagagagaaagttccatctgcttctgtaccaccctctagcagccctctccagccccgccccctcagtgaattcctacagcacacaaggatcccaggccagcaattagagtcctttttcagctctgtttaaaatgtgaggcttagaataacagtgaagatgctttaaaccactacagggggccgggcgcggtggctcacgcctgtaatcccagcactttgggaggccgaagtgggcggatcacgaggtcaggagatcgagaccatcctggctaacacggtgaaaccctgtctctactaaaaatacaaaaattagctgggcgtggtggagcacgtctgtagtcccagctacttggcaggctgaggcaggagaatcgcttgaacccgggaggcggaggttgcagtgagccaagatcgcaccattgcactccagcctgggctacagagcgactccatctcaaaaaaaaaaaaaaaaaacaaacaaaaaaccctacagggcactgcaggaacccaccctccataaagtatgcaaagaattattatgcagcattcacttcccctttgcttctctcccccaaggaatgctcaagataaattctctcttgcaggtcctttatttatcaagccaaacagcatctcagagggataatttatgcaacaaaggttgcaaatcatttgcacatcttcaaagtattattgtccatagcccagtgcatgagcgcctctaattgtctacaaagaaaagcaacaccttcaacaactcacgtccagcagagaaagacttcagacaggaaaagtcaaatcacaagttaaaaagtcagaactggctgggcacagtggctcacgcctgtcatcccagccctttgggaggctgaggctggtgagtcacgaagtcaggagttcgagaccagcctgaccaacatggtgaaaccccatctctagtaaagatacaaaaaattagccaggcgtggtggtgcacgcctgcaatctcagctacgcgggagggctgaggcaggagaatcgcttgaacccgggaggcagaggtttcagtgagcagagattgtgccattgcactccaggctaggtgacagggcaagactttgtctcaaaaaaaaaaaggaaatgggatacagacactttaacttcccaaaacccagacaggttggctgttagcaacctgggcgagaagtctatgaaccagcttcacaataaatgccttttaaggatggctatgtgatgaaggtgttttctctttgtgattaaacgccttactcatctgaagggggaaattccatttaagaagtgaaccaggtatgagaagagacattttccccagagggaggcaatgacctctttcctccctggggctcggaacttgtttcttcacacgtcctcccagaactctagttcttattcccccctgtgctggccctccataaacatttgctgaacaaataaacccatgatggaaggcaagagaaacttcaagacaagacggctaggccgccgactgcctaactggagggaaccagatgttagcattaaagttaaaagttaaaagccttcccaaggtcaccaagcgaggtctctctaacctggcctgaggtcctcattcttctctaccctgtttacccaggatggaaaaatgacattctctgctggtgggctggttgtccacgtgagagatttcaacacagcgtttggaggttttaaacctctatcatcgctgcagcccaaggaacaaaatcaggggccaggtatgcattaggggatttgcaaatgctgtcttatttcatccactcaatgaccatagaggaagatatgatgatgacttatccctctttttatagatgaggaaacagagatgttcagtagttccaaagttccttcccttccctttttttcttccctccctccctcctccctcccctccctccctttccttccttccctccctccttccttccttcttccctccgtccccacctccttccttccttccttgttccctcccttttttttccttccttccttcccctctccctccctcctttcttccttccttcttccctgtcttcccagcttctttctttcttcagggtctgcttctgttgcccaggctggagtgcagtggtgcaatcatagctcactacagcctcgacccctgggctcaatggatcttcctgcctcagcctcccgagtagctggggctacaggcacacgccactgtgcctggctaaatttttattttttgtagacaaaggtcatacagcaaagaagtggaagaactaggattcgaacccaggaccatgggctctgagtctgtgcttgttcatggaagcaccagccagttcagacactcccaggccttgcccagatggtcaaatgcttcaaacaaggacaccagggaaggtcactgttcctcgtatttatgccccttgtgtcactgtctatatctggggttaagaatcactccaaaaacaccacaatgatctcccagactctcaattccagcagagcagacagccgtccccaccaccaccccctccacccactcagtcctctctcggttccacttcaggatgactcgaaagacagaaaaagactcaaagcaaaatgcctaaagcttggaaacgccagcagcccctgaaaactaccgagcttccttttcctgtatttatttatttatttatttatttttttgagatggagtcttgctctgtcacccaggctggagtgcagtggcatgatcttggctcactgcaaccttcgcctcccgggttcaagtgattctcctgcctcagtctcccgagtagcttgaattacaggcgcatgccaccacgcctggctaatttttgtaatttttagtagagacagggttttaccatgttggcctggctggtctcaaactcctgacctcaggtgatccactcaccttggcctcccaaagtgctgggattacaggcgtgagccaccacacccaaccctgagtctccttttctgataacatccttcatttctgcttccttctgcttccttctctgaacatattcgaatcacaaagccccagctctgttgggaaattccgacgggaattgaaacaggttcctaatctcatggtctcacctgagggaaaagtggctaagaagatggaagcaggctgggcacggtggctcacgcctataatcccagcactttgggaggccaaggtgagtggaccacctgaggtcaggagttctagatcagcctgaccaacatggtgaaaccccgtctctactaaaagtacaaaaaattagccaggtgtggtggcgtgcacctgtaatcccagctacttgggaggctgagtcaagagaattgcttaaacccaggaggcagaggttgcagtgagctgagatcgtgccattgcactccagcctgggcaagagagcaagactctgtctcaaagacaaaaagaagatggatgtaactgactgtgcctctgaaatcctaaacagaatattacatggcgtcttggacctccgtgatgttatgcggtacaaatgagacggcccctgaactcccactgtgtaccaggagttggggagaggtgcatagtagcaggacagacatccagagggtaacagggaaccacgggggatgtccccgggctctgggttcgaaaatgcaggccccttgtatccagggggtctgggaaggaacaaattgccacggtgtaatggagccactgcaggtgtccccagaagccacagcaaggccatcaggatgctggggccccgtatccacctctcaccaaggccctgctctgactcctgttggcccctggctagagacccgcccagagggggtttccaggcccaggtgctgggtttctcaccgtatccatttcccattgctgctgtcacaaacgcccacaaatgtaaaacgacatacatttattattttctcctgcatcgggatcttactctgttgcctaggctggagtgcaatggtgcaatcatggctcactgcagcctcgaactcctgggctcaagcaatcctcccacctcaacctcccaagtagctgggaatatagatgtgtgccaccaagcccagctaatttttcttcttcttcttcttcttttttttttttttgtagagatggggtcttgctatgttgcccacactggtctcaaactcctagcctcaagaaatcgtcccaccttggcctcccaaagtactggcattacaggcatgaaccatcatggcctgcctattttcttacagttttggtggtgaaaagcccaaaatgagtcttacagggctaaaatcaagatgttacaaaggttggttccttctggaggctccagagagaatccagcttttaaggcagctcctttttcttggccgtagcatttcaatctcttgcctccctctttccttgaaaaggatccctgcgatggcatttggtgcaccagataatctaggatcatccccccgtctcaagatcctcaacttaatcacatctgcaaagagccttgtgccaagtgaggtaccaaattcacaggtgacagggattacgatgtgggcatctctgggggaagggagaggcatcattcaaccgaccacattcaccctttctggtattttcctctcccagccacagaatgtttcggtagcagtcatcgagtgatatcttttttctttttttcttttttgagacggagtctcgctctgtctgccaggctggagtgcagtgggcacgatcttggctcaccgcaagctccgcctcccaggttcatgccattctcctgcctcagcctcccaagtaggtgggactacaggagcccgccaccacacctggctaattttttgtatttttagtagagacggggtttcaccgtgttagccaggatggtctcgatctcctgacctcgtgatccacccgccttggcctcccaaagtgctgggattacaggcgtaagccaccgcacccggccttcttttttttcttttgtaaaaacaaaacagaaaagatgcaagggtgacacagaaagttctcatgtacccatcactcagtaaagagataaattccccaggaatggaacagaatgtggcacccaagaatctgctgctcaggagagtccccagagctgtctccactgtgggaggatgggatggtgacggagatagaagagtccctgccttgtggcgggggaagagagattgcaaaacggtgagcaaagaaataaacacgttccacctccataggaaaacacagggggaaggggagaaattctgaccccccgggggtcacgtggaagtgtcttggagacatttctggttgttgcaaccagtgtggggtgggagtgctactggtatctagtggggggaggccagggatgctagtaaacaccctaaaatgcccaggacagctgccaccagagagataatccagctccaaatgtcctcagtactgtggttgaataggcagggagtgaggaaatttcatctaagagaaatcaaatcagttgcctaatgtcaccctgctcaaaaggggcagacctggggttaacaaccatgggtttttctcagagattctgcacactgaacttcttgcctcttgttttttgttttgttggttttttctgtttgtttgttttgttgtttttttctgtttgtttgtttctttgtttttatgaaacgaagtctcgctctgttgcccaggctggagtgcagtggcatgatctcggctcactgcaacctctgcctcctgggtttaagtgattctcctgcctcagccacccaagtccctgggatcagaggcacccgctgccacatctggttaattttttgtatattttttgtacagatggggtttcgccatgttggccaggctggtctccaactcctgaccccaggtgatccacctgccttggcctcccaaagtgctgagattacaggtgtgagattaaggcccagcccttgcctgttgtttgagcaaagataatctgaggaaatcgtatgaggaagtatcacagggaaaagcatgtaggtagagggaacagcaagtgccgaggcttacaggtggcaggaaggcagccagtgagctccagccaagggtcccatgtcagagaagtaggtaactgacttgttggtggcagcaaagaagaaggcatgaaccattcgctcttctgtgcagcagtcactctgtgtgtggttttcagacatatttaaagtggatttaaaaaacaaacaaacaaaaaggacttgcaatccaacatctgagtaggggctttattaggcttcccaggacctggggaaattacccaggattcaggataaaactgcaggggtgtctgttgcagggaccagatatattactctctcctgaccacaacctttccaacctccacactggcctctgaagctccgggctccagttactttcactgaccacccccggggctggaagccatggaggggagctctgcagctctttgggcttcacatgttgctctgattgtcatgccttggattagcaagacctctttcagtttgtgagaatagaaagctcagttatacagagagaaagaagagagagagagagagaaaagggagggagggaaggaaggaaggagggagggagggaacgaaggaaagaaggaaggaaggaagggagggagggagggaagggggagagagaaggaaggaaggaagggagggaagagagagagaaggaaggaagggagggagggaaggagggagggaaaggaaaagaaaggaaaggaaggagggaaggagggaaggaagggaaagaaagaaaatgaaaaaaaagaaaagaacgattgctggctcatttaactaacaagtcataggacaaggacactttcaggtacagctagatccaggtgtcaaatgatgtcatggggaccccatctctctccctttccttttcgcagtcctgcttccttctatggtgtcagaagtctgagacacgtggtctctacatggtggcacctggattatagcttcacagcaaggaagatttagcaaggaaaaatctctctatcactcccactaaagtcccagaactgaatcttatggaaccttctggggtcacatgcccacccctgaaccaatcatggaggctggaggaattaagaaagctgattggcccagtctgagtcatgtgccttcccctgagccaatcataagagtctgaaggaataaaggaagctggctctgggaatagagtccacacaatgaggtctgagtggcttcccaagcaaaatatgattctaacccatgcaaaatctggttctatctccaggaatgctgagtaggcaaatctgaatgcctcctctccagagatgagtaatcttgtgtttgcctccttttcaagttggtggcaaaagtgaatcctatttttttgttttattttatttttgagatggagtctcgctctgtcgcccagcctggagtgcagtggtgcgatcttggctcactgcaacctccgcctcccgggttcaaacgagtctcctgcctcagtttcccgaggagctggggctacaggcgcgccaccacgcctggctaatttttgtattttaagtagagacggggtttcgccatgttggccaggctggtctcgaactcctgacctcaggtgatcctcccgccttggcctcctaaagtgctggaattacaagtgtgagccactgtgcccggccacggatcctatttttacaacttgtgccaactctaggtaggttcggtcttgttatgcccattcgaaaaactgggactaacagagcatatgttatgcagtgaccaagaaaattaaataaaataatagatataaaacacttagcacagggtctagtatttggtaagtctgccacacatcggcaattattattcctatattttaaattttactggtaacataatagtatgatttgaatatttgtcccctccaaaactcatgttgaaatgtaattcctcatgtggcagcattgagaggtggggcctttcagaggtgattaaaagggctgtgtcctcataagtggattaatccattcatggattaatggtttatcataggagtgggactggtggttttataagaagaggaagagagacctgagctgacactctcagctccctcgccatgtgatgccctgctccctgtcaggactctgcagagtccccaccggcaagaaggtcttcaccaggccgagcgcagtggctcacgcctgtaatcccagcactttgggaggctgaggcgggcggatcacttgaggtgaggagtttgagactaacctggccaacgtggcgagaccccgtttctaccaaaaacacaaaaattaaccggctgtggtgttgcgcacctgtaatcccagctactcgggaggctgaagtgggagaatctcttgaacccaggaggcagaggttgcagtgagctgagattgtgccactgcactcgagcctgggcaatagagtgagactctgtcaaaaaaaaggaggaggaggaggaggaggaggaggaaagaagaagaagaagaagaaggctgggcgcagtggccacgcctgtaatcccagcactttgggaggccgaggcgggcggatcacctgaggtcaggagttcgagaccagcctggccagcacggcgaaaccccgtccctactaaaaacacaaaaatgagccggttgtggtggcacacgtctgtaatcccagctacttgggacgctgaggcaggagaatcgcttgaacctgagaggcggaggttgcagtgagccgagatcacaccactgcactccagcctgggctacagagtgagattccatctcagaaaaaaaaaaaaagagatccctcctttcaggataaagtttgcatggactctggcatcacactgggtttcaacttttcctttctagctatgtccccttctctaggcaattcagctactccaggccccccgtccacttaccaggacacaggaatcagagtaacacccatctggcagggctgttgtcgggatcaagtacaattatacagcaggcttggggttctgaagcagctgggaagatccacaagccacgatatattgagcaccaactgtttacagctatcaagcatgtactatccaccaggcacatgatcctcctagcaattttttcatttttctgcacagcaccatttgggaaaggctaagtcagagtctggggtgggttgaaagctagaagacactctgagcctatgtcctcggtaaaaaaaaaaaaaaaaaaaatcaggagtgacccatgctcagctgatagcattaacggggaaggaaagagggcgacagagactcttccccaacatctatctagcccagcttggcactttggaccgcagcctgtatggaaattcctggcctctgatgacctcaagctgtcttggtctttaatcctgactctgaacctgtttccttactcagatagaggtctgacttttgacatgtgtcccgtacacccagcacccatctggcttccttatttttttgtttttttaagagacagggtcttgctctgttgtcctggctggtgttcagtggtgtgaccgtagctcactgcagcatcaaactcctgcggtcaagcaatcctcctgcttcagcctctggagtagctgggactacagccatgggccaccacagctggctaatttttttatttgtttagagacagggtcttgctacattgcccaggttggtcttgaatccctggcctcaagtgatcctcccacctcggcctcccaaagtgctgggattacaggcatgagccacggtgtccagcctggcttccctatttggcagtgattatgtccactccttgctcttggtggaggaaacagctgtgtccttggggagggccaggctgtaggtaactacgcttccttagaggaagctataggtataaggaagtttgcttactccagggacagggaggccagctcccttgcaaaaaaggcaaagagggaggccagtgaaaaactggctaaaactgtctgggcactgtggctcatgcctgtaatgccagcactttgggagactaaggagggcggatcacctgaggtcaggagtttgagaccagcctggccagcatggcaaaacaccatctctactaacaatacaaaaattagcccagtgtggtggcgtgcacctgtaatcccagctactcgggaggctgaggcaggagaattgcttgaacctgggaggcagaggttgcagtgagctgagactgcgccactgcactccagcgtgggtgacagagtgagactctgtctcaaagacaaacaaacaaaaaaaaccaactggctaaaactaaagaggttaccatgtgccactcactacactttacatgtcacaagcattaattacctcatttgattttcacccaaaccaagaaatggaagtatctagagaaagaagcccagcataaagacacaagggagcatttttggaggtaaccattgacagaaatgagttaaagaaaattcaactggtgtccaggctctggtgtaaaattctgctttggggtgaaacgcagggttacctgggcacactgtgatggtcctggctaaccagtagcaggtgggcttttgcagagataatccagggccctgtgatgagttggtcaccctagtgacccaattttggcctccagatattggcttctggccaattctaggaggatcaggaagccaaatttagcacagaatgtgctgcttcttcattgaactcctattcacccttcaaaacccagtacaaaagttcccttcctctgtaaggcagagtatagcaagaaaagctagggttctgaagccagagagactgtgggttcaaatcctagctctgtgaaaagattgttgtgaggaccatgtgcctgggagacaatacatgctcaataactctatacagctggtgctcagtagtgacttatggatattcccaggtgcttcaaagccctcaacctgatggatattactctattaaacccaaaatttcccatcttccctcctctaagccaccagaatagactggaacaaaaaaaaattttttttttttttgagaccagtctcgctctgccacccaggctggagtgcagtggcatgatctcggctcactgcaacctctccctcttgggttcaagccgttctcccacctcagcctccagtagctgggactacaggcgtacaccaccacacccagctaatttttgtatttttagtagagacggggtttcaccacgttggccaggatggtctcgatctcttgacctcgtgatccgcctgcctcagcctcccaaagtgctgggattacaggagtgagctaccacaccaggccaatttttttttttttttttttaaagacaaagtcttgtgacatgctcaaaccagctcatgcaaatctccgtttcagtctttctccctcaacctcaagccctgacaccaagcagggctgttttccaattggcttttcctctgccaagaatttccccagagcacaaacagaggcgtgcagcgaagtaaacacgggaagctctgaaaacccattcatgggcaactcaaaggtgtcgagacatcagggtgtgtggccgagctttccgccatgggggcagcgagcctccacgaagcccaggcgacttgccgacggccccactccaggtgaccaagccacatctcgaccagaggaaggagaacatacaaagaaagacactgtctctgccggagggcgatggtccaggcagtgcaccctgggcgaaggggccaagaagccgtaagatgtgcgtcccgaggaaatgcaccgtggttataaatacagcaaagagtgtttggatgaagctggtgtctgaaagtggagacagtcctggctaaccaatagcaggtgggcttttgcagagataatccagggcccttttcacagagacctagggctgtaaggaagtcccccaaacgcccaataaatatccaggttcttgtctctaaattagctggctgaagaaaacttggtccaaactgcatcagaggtgggggtgggggaacagaggaaagaaaaggggatgagagagagacagacagacagacagacagacagagacagagaggggagtatcccattaaggcagcagggcagcagcaaagaggagagaggaggggagaggggaggttgtggccacatgctgtgtaacacttagagtttcctatgcacccagcactattccaattattaaccatttatttcccccaacaatcctagatgttcccattttacagaggagaagactgaggcacagagaggttcagtaacctgcccatggtcacacagctattgagcggccgagccacaagaagacacttgctccatcaatgttactgtgggccagttgccgttataggtgtaagatgattcctcagggagaaacgctaatgttccccttccccgacactttctccagatcagcttaggggtgcttgagtgcctgacccgccacccccgccccaccaccaagccaaaatgcttgagtgacactctctgattctccagtgtaccatgtcaccaattaggtgtttcaagaggggcttccaagagggaaggacctttctgttttcttccctgtggctatgtcctgactccccagcccagcacttgagtaatacataaacccaccttcattaaatgactatcatcatattcctccagattccttggtcccccaagtctagggacgtggtttttgtcggtagcatggcagtgtcaaaccacagagccacgaggctgatgatgggctcttggtttccatttcccccccctcaaaaaaagagcagagaataattgcagagtgcccctcacccccattccagcaccctggtccaggggtcctcaaatggaggcgattctgcccaccaggagacacctggcagtgtctggagacatttgtgtttgccatgcctcgggggcggcgctccaggcatggaatgggtggaagccagggatgctgctagcaccctcagtgcccaggacggccccaccccagagaacaatccagccccagtatccgcaggccccaggtggagaaaccccgtcccggaatgagaagcccctctcctccaccacatcaaagccaagatgacaacgtctctgagtttgacacaaggttagggggaagtctcatttttcaaatggctggctgtaacactaaaaaaggaaaattaaaaatgtctgaggatcggcctagtgtggtgcctcacgcctgtaatcccagcactttgggaggccgaggtgggaggatcacgaggtcaagagatcgagaccatcctggccaacatggtgaaaccacatctctactaaaaatacaaaaaaaaattagctgggcatggtggcgtgtgcctgtagtcccagctactcaggaggctgaggcaggagaatggtttgaacctaggaggtggaggttgcagtgagccaagatcgcaccactgcactccagcctggcaacagagtgagactccgtctcaagggaaaaaaaaaaaaaaaaaaaacaactctaagtaccaactgcagtggctcctgcctgtaatcccagcaatttgggaggccgaggcaggagagttgcttgagcctgagaggtcaagaccatccctggcaacatagtgagaccccatctctacaaaaaatatataaaaattagccaggtgcgatggtgtacacctgtggtcccagctactcgggaagctgaagtgggaggattgcttgagcccaagaggtcaaggctacagtaagccatgatcacgccactgcacaccagcctgggcaacagagccagaccctgtttccaaaaaaaaaaaaaaaatgcctgaaggaggaggtgaatcctagaaacagcccaatttcatctccatatacccctactccaaacaggtttccaaattgcaaaaatggctgataaaaaaaattctttaagctgatgtaaaaactaatgccctcctcctcctgccaattttgctactcttgagcaagatctcagcagctccacttggatgctggaaatatatgccagaggagacttatgatgctaatttcctttagtaaacagttcaaatcttgtcttggacaccaatgaaataagaaaagctagccacaggctgtgtggaattccttcctcttaacactaagcatcaggcattccatgacttttgctcttgggatggcaaacatgaatgtttctagaacactgagttttccagcatataccttttctggttattttcaataggtttggtgtgaaaaattaacgaattcactatttgttgctggacagtccctctggaacaaagaactgtgtgtcaaataccagctgaataatcaagcaaacatttgcattctttttttttttttaaagacagggtctggctctgttgcccaggctggagtgcagtggcgtgatcacagctcaccgcagcctcaacctcctgagctcaagcaatcctctcaactcagcctctcaagtagctgggactacaggcatgcactaccacacctggttaatttttgtattttttgtagagatggggtttcaccaagttgcccaggctggtctcaaacttctggactcaagcgatccgcttgcctcagtctccccaaatgctgcaaatacaggcatgagccactgcacccggtcaacatttgcattctcgtcgaaagatcacgtgctttttccaaagcatgtgagagttttgcatcgactccagccagcttagacctaatgtgggtcctcccctttcaccaagaggacccggctattgcagatgcccttgcaagttacaaaacatgttctccatcaagccacacagggttatggatcggaaaggcagcccaccctgatgaaaaccacagtcgcggtacagattgttttgtttttgtttttgtttttccagaacactgatatgtatcctcaatggttaacattgtgtcctaaaaggtgtttttctgtttcttaacataccagaaacaagatggtctgagaccgcgaccttcacactagggtcatatttcaacacagaaaccagggtagcatcacccagaaaaaaaaaagggaggggaggtaaatcagactgtcccaaatctagggcctctctcagggcacaagaaacagccccagagggcccccatgggtcctgctccctaaggccatttgtccctcttcactgtggtacagggtggttctgaaacgcaccctaactttagtgatgacacagggtccggcaagtatccagacctatagtccagcagactttccatgaagacctgccctaaaatgaatatcgacacttggccagaagcaacaaaataacattccactctgctggaaaattgaggcgggggcttaaaggcttattttaacagcttaacagcttagcaaaataaatctgctgtcattatacacagacaaatgtcgtttatgtctcttgcatctatgagacaatcaagatttcatgatcacaccccatttactcagtgaggctaaagacaggaaggtcaagagtattaacaattatataattatcctctgcagtaaaacaattgaggcattccactcaaatcagaaatgagactgggctgaccatattcagctgcgtcactgaacactgttctggaagttcctgccataacaaggttaacagcaataactggtctaattattggcaaaaggcaagaagtcatcattatctgcagatgctgcaattatagagttggaaaattgaagggaatcaattgcagggcttttagaactagtaagcatttaataaggtagcagtaagtaaagaaaacacaatccctgtcccctatgctacaaaataatcacttttaatacttcaaaacatctcccttatattagatgatagacacacggatagatggagagatgaatggacacatggatgggtggatgaatgggtgggtggagggatggatgaatgaataagtggatgtatgcatgggtggatagatggatgagaagattgctgggtgagtggttggaagggatggagggacaggtgtgtggattgttggcagagtagacagaaggatggatggatggatggatggatggacgtctgggtgggtggatggatggatgaatggatgagtggatgtatggatggatgaatggatgagtggatgtatggatggatgggtgattggatgagtggatggatggatgggtgagtgaatggatgaagggtgactgaatgaatggatgggtgagtggatggatgatggatgaatgggtgagtggatgaatggatggatggatggatggataatagatggtgggtggtgaatggactggatgaatggatagatggatggatggatgggcagatgagcaagtggatggagggatgatggatggatggatggatggatggatggatagatggatggatggatggatggatggatggatggatagatggatgggcagatgagcaagggagtgatagatataaagccagcaatctaagaacaatgcttacaagaagtagacaaactgtgtctgaagcaaaatcacaaaacatttctaagaacaggaaagaacccttgggaaaatggagaggaaatccatgacataggagagtacaagtaaatactgccaaggtgctccttctctccatcaatttatggacttcacatacaatcaaccccataaagggcctctgggtctgtgttttccttttcctttgcttccctttttctttcttggaacttagctacagtttttaaacttttggaagcataaacaaagcaaggatgcttttgaaaaatgaaaaagaagaattactctggaggatacatttacagtctttttttttttttttttttttttgagacagggtcttgctctattgcccaggctggagtgcagtggcacagtcatggctcactgcagcctcgaactcctggagtcaagtgatgctcccacctcagcctcccaagtagctgagaccacaagtcagtgccaccatgctcagctaatttttctttttcttttttttgtttgtttgtttttgtttttgtaaagatggggtcttgctgtgttgtccaggccggcctcaaactcctggcttcaaggaagtcttctgcctcaacctcccaaaacactgggtttacagacatgagtcagcgtacccggctcagaacttttatccatattgttctcggccacattctcagaggctcgcacagcacctggctctcagcagatggacagaaggcacaggtcaatgaatgggcagcttaggtagggaagatggatttgaaggccatgtaagcagttaaagggatgggactcagtaattgatcaggtgtagcaatgagggagagaaagattcccagctctagactgaggtcaggctgtgagctcagagcaaagcctgcagttcatcttggtagcagctggatcactttgagcacagtgctgacctttctgtcagcctcaacttctccctctgcaaattaggaatcctaacagtgtccacctggtgaggtcactgaggcgatgacaggataaaccacaccaagtgtctagctcatagcatggtactccacctttcagaaatattaccttggctgggtgaggtgcttcatgcctgtcatcccagcactttgggaggccaaggcaggtggatcacctgaggtcaggagttcgagaccagcctggccaacatggtgaaaccccatctcgactaaaaatacaaaaattagccgggtgtggtggcgggcatctgcaatcccagctacttgggaggctgaggcagggagaatcgcttgaatccgagaggcggagattgcagtggactgagattgcaccactgcactccagcctgggtgacagtgagactccatctcaaaaataaaaaaaaaataaaaaatattagctcaaggcctcctctaggagagattaggtcagactgttcctcctgcagcaaggccctttgcagtatggaaaaacctcagaggtctgtgcagaagagagactatctagggacagatttcaacaaagccagtgccaaggaggcgcgtgtctacagcggagctgcggcctttagaagcctccagcctcccctcctggcatggacacagggaagccaactcccttggccagagccaggagccaggagccacaccagctcgctgatttccagaaactcacaattgcccacttactcggcacagcctgtgcgccacggaggaaactggaaaggagggatctccttggaacattctggcagctcagcaaagaggggggaagaattaatttcggatcctgaatttgcatctgcaaatgctgttttcgttcaaacgctttgtgttgtcttgtttttggtggtgttttttgtttttttttttttttttttttttgagatggagtctctctctttcgcccaggctctagtgcggtggtgtgatctctgctctctgcaacctccatctcccaggttcaagtgattgtcctgcctcagcctcctgagtagctgggattacaggtccccaacaccacgccctgctaatttttgtatttttagtagagacagggtttcaccatgttggtcaggctggtctcgaactgctgaccaccagttatctgcccaccttggcctcccattgtgctgggattacagacatgagccacggcacccggccctgtgttgtcttgataagagtttaaagtgactggatgttggggctatatatccaccaccaacaacctgccatacatccttttaccctcaaatttttgctctttgaatcctaactgctcctggcagtaaaccccatctaggactacctgccaacataccttaaacttttctgtctctttttttttttttaattatagagacagagtctcactatgttgcccaggctattcttgaactcctgagctcaagcaattctcccacctcagcctcccgaagtgctgggattacaggcataagccaccacactcagccaaacttctcaaacaatactcttcttaagccatatctcaggctctcatatgccctactttttgcatgaggctaactatttctttctctacccgcttcttcaataaaaccaaactaaacaataataatcaacaatggtgatagtaatcattgtaacacctcattcccgggggtactgggaattcactggaaagggctgggatgaggcaatgtcctccattttgttttcagtggtggttacacaggtgcatatattttttgtcaaaattcattgaactcaatgcttcagatctgtgcattttattttattttatttattttgagacagagtctccttctgtcaccccggctggagtacaatggcctgatcttggctcactgcaacctccgcctcctgggtttaagcgattctcctgcctcagcctcctgagtagctgggattacaggaacgcaccatcacgtctggctaatttttgtatttttagtagttggccaggctggtttcaaattcccgacctcaagtgatctgcctgcctcagcctgtcaaagtgttgggatgacaggcgtgagccactgcaccccggccatgtgcattttattgtatgttaaatatttcagttgttggccgggcccagtggctcgcacctgtaatctcagcactttgggaggctgagggtggatcacgaggtcaggagatcgagaccatcctggctaacaagatgaaaccctgtctctacttaaactacaaaaaatcagccaggcgtggtggcaggcgcctgtagtcccagctacttgggaggctgaggcaggagaatggcgtgaacccgggaggcggagcttgcagtgagccgagatcccgccactgcactccagcctgggcaacagtgcaagactccgtctcaaaaaaaaaaaatttcagttgctaaacttaatcaaagaaataacagtagctacaataggtcacaatgtacagctgcaatataactacaatgctagcaacaatgtaactaccatgtttatcattcccgtatcctcttctctgatcctcacaacgagcttgtgatacatgttgggtttggttttggtgttgattttttgagacagtctccctctgtcacccaggctaaagtgcagtggcgccacctcgccatctcggctcactgcaacctccgcttcctgggttcaagtgattctcctgcctcagcctcctgagtagctgggattacaggcaccagccaccacacctggctaatttttgtatttttaatagagacggggtttcaccatgttggccaggctggtcttggactcctgacctcaggtgatccacccacctcagcctcccaaagtgctgggattacaggcgtgagccaccatgcccagcctgtgataccttttggttcccattttacaaaagaggaaacagatcccggagaactccagtggacttgcccagagccccacggctactaacaggttaagcctggttccaaaccatcgtactatgctgtgtggcctggcatgtgctaggtagggggagaaagaaatgaaacatgactgcaacttttcagaaacttctacaagcaagccctgaccccgagtgctgggaaccaccctatcaatgaaagaaaccccacacactgcccactctgctgtcctgctaccctgcacatcctatgccttataccaaggatggccaatccctgcaacactgggtcacccaggaaagctaaacgtcttttgttttttctttttctgtctttttttttttttttttttttttttgagacgcagtctcgctgtgttgcccaggctggagtgcagtggcacgatctccgctcactgcaagctccgccccctgggttcacgccattctcctgcctcagcctcctgagcagctgggactacaggcgcccgccaccacacccggctaatttttttgtatttttagtagagacagggtttcaccatgttcgccaggatggtctcgatctcctgatctcgtgatgtgcccgcattctgtcacattctgtcacacaggctggagtggtgcagtggcgcaatctcggctcactgcaacctccacctcccaggttcaagtgattctcctgcctcagcctccctagtagctgggaccacaggcgcgctatggtgtccagctaattttttttatttttagtagagatggggtttcactatgttgggcaggctggtctcaaactcctgacctcaagtgatgatccgcccacctcaggctcccaaagggctgggattacaggcatcagtcactgcatctggcccctattattttaaatggaaatggggtctttctttgttgcccaggctggagtgtagtggtgcgatcataactcactgcagcctggaactccctggctcaagcaatcttcccgtctcagcctcctgagtagctgggactacaggcacatgccactacacccaattaatttttaaattttttgtagagatgggggtctcgccatgttgcccaggctggtcttgaagtcctgggctcaagtaatcctcccacctctgcttcccaatgtgctgggattacaagtgtgagccacactgccagaccaagatgatttaaagtatacaggaggatgtatgtaggttatgtacaaacactacgccattttatgtcagggactggatccccaggggggttttggaatcattgaagataccaaggcacaagtgtacaatctatccaggagaaaatgaaaatgggagaatcgacagttccgagtatcaggatctaaggaggagatttcaaaacactgcttttcatatcctcccatcatgaaaacaagggtttttcaaaaatctcttcttaaaaatatttctgggcccggcgcagtggctcatgcctgtaatcccaacactttgggaggccgaggcgggtggacacgaggtcaggagatcgacaccatcctgactaacatgatgaaaccccatctctacgaaaaatacaaaaaattagccaggtgtggtggagggcacctgtagtcccagctacttgggaggctgaggcaggagaatggcgtgaacccgggaggcggagcttgcagtgagctgaaattgcatcactgcactccagactgggcgacagagaaagactccgtctcaaaaaataataataataataataacaaaataaaaaaaatttctggaaatagacttttcacagatggttgtgagggccagtattcaatcatcacttgcaatcagtcagccctgacttctcctttggcacttatctgcttaactacaaactcagtcaacagtctaaaagcaaggcaagtttcaacctgcagctcgtccaccctttgagaaccctgagaagatcattagaccactgctatgctctcccctctccaaacacagtcacgaactccctacattcttactccttgtgtctgaagatgaataaccaccctaaaattatcgctctcaactctctcacaggaaagaaaatttccaggactctagaaaataagattctgcaaatatccatgtgtctggcgctagagcttacggaagattttcaaagccacagtgtggagctaattaaattaattacaacaccctgtgaaaaatcagctgcttttcaaagatactgttaagaaagtgaaaggggccaggcgctgcagctctcgcctgtaatccaacactttggaaggatgaggagggagattgcttgagatcccaggggttcaagaccagcctgggcaaggtagtgagacctcatctttacaaaaataaaattagctgggtgtagtgatgtgtgcttgtaatccaagctactcaggaggccgaggtgggaggattacttgagcccaggagttcagggctgcagtgaactccagcctgggcaacagagtaagatcctatctctaaaaataataataacaataataataataaagattgacaataaatattaagtgctgctaaggatgtggagcaattagaactctcatacattgctggtggaaatataacagactccaaccacttaggaaaacaatctggcctttcctttttttttttttttttttaaagacagagtcttgctttgttacccaggctggagtgcagtggtgcgatctcagctcactgcaacctccacctgctggattcaagcaattctcccaccatagcttggattataggtgcccaccaccacacccggctaatttttgtattttgagtagagacggggtttcaccacgttggccaggctggtcttgaactgctgacctcaagtgatccacccgcctcagcctcccaaagtgctaggattacaagcatgagccaccgcacctggcctgcccactccttatacacacttctactacacaactcatccattctgctccaggatataacctcaagagatatgaaggcattggtccacataaaagactcctacacaattgtgtataacaggttcatgcaggtttatgaataatagccaaaagttgaaaacaacccaaatgtctctcaacagctaaaatggtgaaactaaatgtcgtctctccacacaatggaatgctactgaacaacacaaaagaaatacgctattgataaatgcaaaaccatggatgaatctcaaaacattacaccaaagaaaagatgccagacattggccaggcaccatggctcacgcctctaatcccagcgctttataaattacttagtctcactcttatcctaagtgaagtaaatcaggaatggaaaaccaaacatctatgttttcactcataagtgggagctaacctatgaggatgcaaagtcttaagaatgatacaaggcccggcacggtggctcatgcctgtaatctcaacactttgggaggccgaggcgggcggatcatgaggtcaggagatcgagaccatcctggctaacacggtgaaaccctgtctctactaaaaatacaaaaaaattagccaggcatggtggcaggcgcctgtagtcccagctactcgggaggctgaggaaggagaatggcatgaacccaggagacagagcttgcagtgagccgagatcgcgccactgcactccagcctgggtgacagcgtgagactctgtctcaaaaaaaaaaaaaaaaagatacaatagactttggggactcagggggaaaggataggaagtgagtgagggataaaagactacaaattgggttcagtgtatactgctcgggtgatggatccaccaaaacttacaaatcaccacgaaataatttactcatataaccaaataccacctgttcccccaaaacctatggaaataaacaaaaaaacaggccagacgcggtggctcacgcctgtaatcccagcacattaggaggccaaggcaggtggatcacgaggtcaggagttccagaccagcctggccaatatggtgaaaccccgtctctactaaaactataaaaattagccgggcgtggtggcaggcacctgtaatcccagctactcaggaggctgaggcagaagaatcgcttgaaccggggaggtggaggttgcagtgagcagagaccatgccactgcactccaacctgggcaacacagggagactctgtctcaaaaaaataaataaataggctgggcgtggtggctcacgcctgtaatcccagcactttggaaggccgaggcgggtggatcatgaggtcaggagatcgagaccatcctggctagcatggtgaaatcccgtctctatttaaaaatacaaaaaattagccaggcatggtggcgggtgcctgtagtcccagcaactcgggaggctgaggcaggagaatggcgtaaacccgggaggtggagcttacagtgagcgaagatggcgccactggactccagcctgggtgacagagcgagactccatctcaaaaaaataaataaataaaattaaattaaattaaattaaattaaatttttaaaaatttaaaaaatacccagtctcagatagttctttatagcaatgtgagaatgaactaatatcctctcatcccaaaatcaaaatgttcagttatgtacaaaaccaggaagaaaaaggcaaaaaagggaaggggaggtttccctccatcttgggcatgtttttatactcattcatttcccagaggaaggatggaaagaaaatcctcctagaacagacttgacctggccaaacaagccctgaaatcatttgaagagaccaggattgaatgtagaatcataaagtaaatccataactgtttccctcccacactaaggaagttctccatctctcaaaatccaaaagcaaatgaaataatagagggaaaaaaaaagcaccaagttcctggacaaatgccacattccacatcaacatagaaaacgtccacgggcaggagatggactttccattgatgcaacagaaaatggaaaaagaggccaggctcagtggctcacgcctgtaatcccagtactttgagaggctgaggtgcgtagatcacttgaggtcatgagttcaagaccagcctggccaacatggtgaaaccccatctctactaaaaaatacaaaaattagccgggcgtggtggcatgcacctgtaattccagctacccgagaggctgaggcaggagaatcacttgaacccaggaggtagaggttgcaatgagctgagatcacgccattgcactccagcctgggcaacagagtgctccatctcaaaaaaaaaaaaaaaaaaaaaaggaaagggaaagtgaaccaaaaagtgaacccagccatgagtctcatctctcgtctcagccttcaaagaatcacaagggtccaggccggagaacttttgtactgccctccattccctccatattcctcactggaaagaggctcctatgggctaagtctctcaatgggccccatgcttcaatcaggaaggggtgggcttccactatgtgtccccaaaacttgggcagccacaaacagatatttgtagacccgtgtttttcccagcgttagttacaatggccagaaggcggaaacaacccaaatgtccatcaacagatgaattctcaaaaaaaaaaaaaaaaaaaaaaaaggttaagatggtcaattttatgatgcatgtcctattattactacaaaaaaaaaattacagatttaaagaagagcaactgaagatatccaaacatcagcatctcaaagagatttaaaaagatggatgcttattagtctaactgggtttctatctggccacaatttcaagtgagaaaagcaaagcaaagcacaattgaaatgctgggtaaagaaatgcaatgacagcagcaaagcatttccgacacttcaatcccttgtgcacctctttgtgacgttgccaatgcagagtccctgaagaaaaaggcccagcccccccaccccaaaacagctcccagggaaagaggaggaagaggtaggaagacatggctaagaagcatacagagagattcccagtcttaccaggaatcagggagatgcaaaagaataccataggataccaatttccatgcactggaattaacataattttcctgcagccttgcccacatttgacatataccttaatgcatcactggtgaaactgtcacagccaccttggagaccattcggggagtatatactagatctaaaaatgcacatactccattccctgtgacttcaattctgaacatcaatcctagaaaaccattcacaaatgggtaggaggagatggacaccaagatgttcattgcagcattgtttataaaagaaacaaaccggaaacaatctcaatgcctcccactaggggagctggtgagtagcatgtggcttattcatacaagatactatgtagcacttaaaagaatgaactagcaatactgaatcaagaggcataaacttaaagaacatagtggctgagaggaaaaaaaaaagcatttggcttaagaactcatgcagcaggtgtagcaattggaatcacaatcacaaaaatatcatatgtgtgcatggtgaggaagatcgcagagttttttgttttttggttttttttgagacggagtctcactctgtcgcccaggctggagtgcagtggcgccatctcagctcactgcaagctctcgcggagtatttttaaagactagatccattacagcaggaccagccacgtgtggccagtcagaactgaaatgtgctttacgtgcaaaatacacaatggcttcctaagggatagtactacttagcttcccaatatatgcagatatttagaatactcaaaagtgtattacaatataaatggcagtgtttaacaccagtgaactgtatactgaaaaataaataagatggcaaattttatgatgtatattttattacagcagcgaaagatttaaagaaagatttatgccaggcgtggtggctcatgcctgtaatcccagcactttgggaggctgaggcaggtggattacctgaagtcgggagtttgagaccagccaggccaacatggtgaaaccccatctctacaaaaatacataaattagccaggcgtggtggtgcacacctgtaatctgagccactagagagcagaattgcttgaggcaaggcggaggttgcagtaagccaagattgcgccattgcactccagccagggtgacaagagtgaaactcgttgtcaaatacaaataaataaataaatagatttaaagaacaactgaagataacccaaaatccaaaatcttaaatgctccaaaatttcctggcccgaaaatccaaaatcctaaatgctccaaaattcaactttttgagcgccgacatgatagcagtggaagaaaattccattcctgacctcttgtgacaggtcacagtcagggcggtgaaaaccttgtttcccgcacaatattactgaaaatattgtatacaattacctccaggctatgtgtataagatgtacatgaaacataaatgaatttaacgtttagacctcgttctcagccccacagtatctcattacatatacgcacatattctaaaatcccaagtgggaaacacttctggtcccaagcattttgaataagggatactgaacctgtatctggcattgacgtgtgtacaaggttatgtgtcaaaatacatgcagggctggaagtttatgtaccaaacctaagagagttgttacctctgggaagaagggaggagaatatagcaagggaagatgacaaagagaactccaactgtatcttacattttattactttcacttattcactttttattttattttgtttttttttttttttttaagagatgaggccttgccctgttgtccaggctggagtgcagtggtgtgatcgtagctcactgcagcctccaactcctgggctcaaatgatcctcccactttagcctcgtgagtagccagaactacaagaacatgccgccacccccggctaaatttttttaaatttttggtagagatggggtcttgctatattgcccaggcgggtggatcactggaggtcaggagttcgagaccagcctgccaacatggtgaaaccccgtctctacaaaaatacaaaactttgccaggcatagtggcgtgcacctataatcccagctacttgggaggctgaggcaggagaatcacttgaacccgggaggcagaggttgcagtgagctgagatcgtgccagtgcactccagcctgggcgacagagcgagactgtctcaaaaataataaaataaaaataaatcagctgggcatggtggcacatgcctgtgatcccagcacttggcagtatccggagacatttttggttgtcatgacttggggttgctactggtattgagtggaggccagggatgctactaagcttcctgtaatgtacagggcagtccccaccacggagaggggttcagcccagaatgctaacactgttgaggctgagaaaccctgcctaaactcattaaatttaaaaaaagaagaaaacaagccaggcacagtggctcatgcctgtgcactctggaaggccgcagtaggaggatcactggacgtcaggagttcgggactggccaacatggtgaaaccccgtctctactaaaagtacaaaaattagccaggtatggtggtatgcacctgtaatcccagctgcttaggaggctgaggcaggagaattgctttgaactcaggaggcagaaattgcagtgagccaagatcatgccactgcactctagcctgggtgacagagtgagactcttgtctcaaaaaaaaaaaaagaagaaggaggaggagaaggagaaggaaaaggagaaagagaaggagaaggaggcaagccagatgtggtggtgtgttcctgtagccccagctacttgggaggctgaagcttgaggatccctttagcccaggagtttgaggctgtggtgtactatggctgtttctgaatagccactgtactgggcaacatggtacacatctttttaaacattctttctaaaaacagcaaatttcattttatgtgtgacttttactataaataaaaatgtttttaaaataataaaagttcagccgggtgtggtggctcatgcctgtattcccagcatttgaaaggctgaggaggagggcagatcacttgaggtcaggagttcgagaccagcctggccaacatggtgaaaccccgtctctactaaaaacacaaaaattagccaggtgtggtgtgggcgcctgtaatcccagctactcaggaggctgagacaagagaattgcttgaacccgggaggtggaggttacagtgagccaagatcgcaccactgctctccagcctgggtgacacagcgagactgcctcaaaaaaaaaaaaaaaaaaaacagctacaactctgcaactctggtgtaatatcatgaaaccaaaaatatttgcatgttgtgtaccacagaagctatttataaatgaaaattttggcctaaaaaaaaagaaagaaaaggaatccaaatcagaactcctctaaaaaagcagtaccctgttttcagtgttgggctactgctaaagcagagaaaaatgaggttttgggaagcgggacagattcttagagccatgttagcaaaattaccaaaccccatccccccaacacagacacacacaccactcttagtcttgaacaataaagacatacaaggagcacagactccagatggcagactaaaaaaacattattagatttccaatgaaaacttttgctgtagtggttctaacgtgacacagccctacaaaaataaagatgaatcacggcccatttcgaaggagaggtctgactgccttacgtcacagccagtcacacactgttttggtttttttttttttttttttttttttttttgagatgcagtctagctctactgcccaggctggagtgcagtggtgcgatctcggctcactgcaacctccgcttcctgggttcaagtgattctcctgcctcagcttcccgagtagctgggattacaggcgtgcgccaccacacctggctaatttttgtatttttagtagagacggggtttcaccatgttggccaggctggtctcgaacccctgacctccagtgatctacctgcctcagcctcccaaagtgctgggattacaggcatgagccaccgcacctggcctaaattttttcttaagttatcaaagaattgcttccccccaaaagttatggcaccataaaatttgtcaatgaatactcagttacctgctatttcattttatgtggctagaacacaataaataatccaaactgatgaagacattgcaaaataaaaccaaccaaaaacatagcccaatttcactcatgaacacagatggcaagaattcagaaaacgaaacaaagcaaacctagcaaatcgaattcaacgttatgctgaaagaataattcatcacaaccaagtaggttttaccacaggaaagcaaggatgattttatattaggaaatctattaaacatagatgtcggataataccattgttaaatatttaatgttagtctagaagccctggtcaatagaataagatttaaaaccgaaacaagaggtatgattttagacataatttttttcatgcttccagaactgagcagacataatttttttaaatgaccataatttgtagaggacgaaattgcacacaatgaataaaacaatttaaaaacctaccaatcaatttcactaaagtatctggattcagggtaaatatgctattcatagtagccataactaacacaacaaaactctgtgatacagaaatcaggaaccatcgtcacaaaaataatacaggataaagatgaagaaaggacaatataaaagatttgaacaaattggctgggcgcagtggctcatgcctgtcatcccagcactttgggaggccgaagtgggcagatgacttgaggccaggaattcgagaccagcctggccaacatggtgaaaccccgtctctactaaaaatacaaaaattagccgggcatggtggtgtgtgcctataatcccagctactcaggaggctgaggcacaagaattgtttgaacttgggaggcagaggttgcagtgagccgagatcgtgccactactctccagcctgggtgacagggcgagactctgtctcaaaaagaaaaaaaaagatttgagcaaatggaaaaggagatcccatacctgcccggaaaggaaaaatacgaaagtattgatttcttaatttatggattttaacccatttttccatttgtcccaagaataatctattctctaatcctaatgtaacattatagacatttctgttacattaagattagagacaagttctgtttagaaataactccaagaaccgttttatattttctcatattgaaaatcagtcagatttgcttcagcctcaaagaacatgtttatgtaaaattaaaggagtgctggcagcgagctgcactttttttcctctgggaaatgggttatgtttttaattaaatttttaaatcaatatctcaatgggtttttttgtttttgtttttgctttttttttttttttttttttcaagatggagtctcgctctgtcgcccaggctggagtgcagtggcatgatctcggctcactgcaagctccgcctcccaagttcacgccattctcctgcctcagcctcccgagtagctgggactacaggtgcccaccaccatgcccggctaatttttttgtatttttagtagagacagggttttaccgtgttagccaggatggtctcgatctcctgacctcgtgatccacctgcctcggcctccccaagtgctgggattacaggcgtgagccaccgcgcccagccctcaatgggttttatatgagagtgagaggagggaaatatttagttcaaccagaaaaggaaacactcttctaaaaggtgtaatagggaaaaaactagatttgccactttataaagcatgttcttaccaggcatgagcttgtagtcccagcaacttggaggctaaggaggatcacttgcacccaggagtttgagtccagcctaggcaacacagtgagcccccattctttttttgaagacagaatctcgctctgtcacccagactcaagtgcagtggcacaatctcggctcattgaacctccacctcccaagttcaagcaactctcctgtctcaggttcccaagtagctgggactacaggcatgtgccaccatgcccggctaatttttgtatttatagtagcggggtttcactgtgttggccaggctggtctcgaactcctgacttcaagtgatccagccacctcggcctcccaaaatgctgggattgcaggcatgagccaccacgcccagccgagccccacttctttaaaaacaaaacgacaacaaaaacaaaactaaaaaaacacatattctaaatctataaacagtatggtactgggataagattaagacacagaggacttgaaatagaattgatatcccaaaagcaaattcatggttttggttgaatttaatacctgatgaagaaaacatcaagaattactggggaaggaattggttattcaacaagtggaattcataaagttaaattcctactcaaaaaaaaatcatttaatgtcctcagtcacaccatacacagtcctgatgtccaattgagctccaaattctgattaaaatgttattgtactcatgaacctaaaataagaggtttttaaaaaaatgttttatgagccccactgtttcccactccagggttctttggcagatggcaaacagggccacaaattcttcctcttccatcaacaggtaaagactatattctccctttccctcccagctcaccttagccaatgggatgttagcacacaagatgcaaacagaaactcaaaaggcacttttgtactggaaattgatctcttgccactcttggaacgctgagactatcatgtaatctaagcccaaactagccaactggaggatgagcagctacagggaagaaaaccaaggcctcccagctgacagccagcaccaaccaccagacatgtgagtgaggccatgctagaccatccagctaccagacaacccactggttgatcccagacatgagagagaaaagagcctgtgtttgtggtcagctggtgggtctaaacaagaaaacttgcccagcgacccaaagaatcatgagctaagtacatgattgttgattaagccattacgtttcagagtagtttgttacacagcaaaagttagctgataaaagttccatgattgaacgtggatacaacaagttcccagttttatgtttcagggtggtttgttacacagcaaaactagctgatacaagctccatgattgaacttggatacaacaagttctaagttctatgtttcagggtggtttgttacacagcaaaaattagctgatacaaactccatgactgaacttggatacaacaagttccaagttgtatgtttcagggtggtttgttacacagcaaaagctagctgatacaagctccatgaatgaacttggatacaagttcctagttctatgtttcagagtggtttgctacacaggaaaagctagctgatacaagctccatgattaaacttgaatataaattccaaggtctgtgtttcagagtggtttgctacacagcaaaagctagctgattcaagctgagagccctgtgttgccccagttaacacactgcccccacctcatggcttaagtgaatccaaatagattcccattactggcattcatgtgttgactgagacactcagtgctgagccaggaagacaaactcaggctggggttctctcccacggccccttccccatccttaatccacttcctccaaacccacacccattttactccacttaagctgcaatgcactgttctctgttcccagagaggagaagccaggaaggagctgacacattcctcattcttggtgacccacagacaagacactctgagccccggtcaacacacctactccttccttgttcctcttctcgattagatgtacctataatagcctctttgttgtgatcaactttcccaagccactccttcctctctattccagggactctcaaggggtggagaggttgaaaaaacattcaacggtatattttatatttagaggaaaaaagaacaaactccaagtagggaagaggaactggatttttatttttatcgaaagaggggatataccagttcaaagctgaggaaaaccttggagactggttcccttatcatgtcctcatgatagaagaaaaaacagacattcagaaaagctagacaatttgcccaaggtcacaaaacagatataggcttcaaatgcaggcctgtctgactccagaacaatctttcatcatggaatgaaaagttctaaggcagaggtacccaatacaagtttttgcagtgatagcaacattgtctgtctgcattgtctaaatatggtgagtacaactgagggacaaatatctaattttaatgaatttctacttaaattgccacatgtggctgtggctggcagagctaccttagtggacagcgtcattctagaatttcactaagttggttctatatcactaccaaaagcaggacccagacaggtgcagtggctcatgcctataattccagaactttgggaagccaaggcaggaggatcacttgagcccaggagttcaagaccaacctgggcaacacagcaagactccatcttttattttttattttttatttttttatttttggagacagggtctcgctctgtcacccaggctggagtgcagtggcatgatcttggctcactgcagcctcaacctcccaggctcaagcaatcctcccacctcagtcccccaggtagctgggactacaggcgtgcaccaccgcgcctggctaattttgcaaaaatattttttaaaaattagtcaggcacggtggttcatgcctgtagtgccagctacttgggaggctgaggtgggaggatcacttaagcctgagaggttgaggcttcagtgaggtgtgattacatcactgcactccagcctgggcgacagagggagaccccatctcaaaaaaaaaaaaaaaaaaaaaaagcatgaccctcaacatacatacccacccacccagaagaagtggcaactgaaagatttcagaaagactttaagggacaaatagcatgaggaaaatgaagttatgagtaaacctgggaaagcccttcataaatattctaatgtcctctaaaatacagtagacaacccacgccattcgacacttaactgagttagcaagaacaagttctgaagaatggattatcctggactattcccggttggccagaatttttttttttttttttttttgagacggagtctcactctgttgcccaggctggagtgcagtggcgtgatcttggctcactgcaaactctgcctcccaggttcaagcgatggtctcctgcctcagcctcccacgtagctgggactacaggcatgcgccaccacgcccagctaattaagtatttttagtagagacagggtttctccatgttgatcaggctggtctcgaactccccacctcagatgatccgcccacctcggcctcccaaaatgctgggattacaggcgtgagttactgcgcccatgtcccccagtatcttttgaagccatcctttcaaaactaaaagtctgtgaagaattacactttcctctgaactacattgacaaatttaagaccatcctctaacttttttcctgcatcaaattcatccttccctgggaacctctttcctttcagaggttcagctatcgctctccccgtgacatctgtgatgacgtcttctgcccattccatcttctttaccaccaggaatcctaaggtaaacctcttgctttttttctcaccccagtaaaattcctttgcaaataaccttcatacctttctcgcttataaaaataattttcttagcaaaacttgccttcgtcaagaacacaaagttttgttatgaagttcggtctgtgccctgtttgtcagacactaaaaaaagggaggcccgtcggcaccgttttaccgcagaaccgaattcccagatggaacctcatatagctttatcactcaagtatggatctctagacaaatatttagtctggcccatttttaaaaaatgggtacacctgtaatcccattgaattgggggaggctagtgtgccagaactgcttgagccctggagttcaagaccagcctgggcaatatagtgagactccatctgtacaaaaaataaattaaaaaaaaattagcggctgggcgcggtggctcacgcctgtaatcccagcactttgggaggccaaggagggtggatcacgaggtcaggagatcgagaccatcctggctaacagggtgaaaccccgtctctactaaaaatacaaaaaattagccgggcgtggtggcaggtgcctgtagtcccagctactcaggaggctgaggcaggagaatcacttgagcccaagaggtggaggttacagacagctgagatcgcaccactgcactccaacctgggcaacagagccagactctgtctcaaaaaaaaataaaataaaataactgggcatggtgacaggggcctgtagtcccaactactctggaggctgaggtgggaggatggcttgagaccaggagttccagactgctgttagctatgatcatgctactgcactccagcctgggtgacagagcaagaccctgtcgaaagaaaagaaagaaagaaaagagagggaaaggaaaggaaaggagaaaagaaagagagagggagggaaaagaaggaaaggaagaaaagggaagagaggggatgggaaggaggagaggggaaggaggggaggagaagaaggggaggggaggggagaaaaatgaaaggaagagagagaaaaagaaagaggagggagaaagggaaagaggaaggaggagggagagaggaagggagagaaggaagggaggtaagaaataaaaagaaagcaaggaagaaagaagaaaagaaagaagaaagaaaaggaagaaaagaaagaaagaaaagaaagagaaggaaggaaggaaagagagaaggataaagggaggaagggagagggagggagagaaggaaggaagggaggaaataaagaaaaaggaaggaaggagggagggaaggaaggaaggagaggagggagggagggagggcagggaggaagaagatgagagttcgggcaaccgtgtttaaaaaacggtgtgtttttctttaaaacaaaagaaaaagaaaaaaaatcaaagaacacaccaccactcagagccatgtgcaaacgaacagcatcaagcatggtcgcctttgaaaacagctgactgcagagagtgctgaaatggtacttgttaaataaagtcagtccaagaggtagaacctgagtgtgaccctagctctgagtctggagctcagaggggcaagcagaactgtcccaggaacgtacgatcagcaacactcagactggggactgcaccccaagccagaaagcccagctcttcaacagagagaaggtaaaaggaaagggatggagggagaacctgtggaccaggctttctgcccctcagcactattgacatttggggctggatcattctttgtggctgggctgtctctgcattgcaggacgttgaacggcatccctggcctccatctgctcaatgaaagcagtacacacacattccctggagttgtgacaaccaaaaaatatctccagacattgccaaatgtcccctgggagacaaaaaaaatcaccctcagttcaaaaccactgctagagacccaaacaaacacatcaatttattttattgtgttaatttttgagccagggtcttgctctgtcacgcaggctggagtgcaatatgcaatctcggctcattacagcctcaaccttctgtgctcaagcgatcctcccacctcagcctcccgagtagctgggactacaggcatgcaccaccatgctcggctaattttttattttatttttagtagagatggggtctcactatgttgtccaggctggtctccaactcttggcttcaagtgatcctcccgcctcagcctcccaaagtgctgagattacaggcatgagccaccatgcccggccatcaatttttttttttaatgggcaaagctaaatatttgtctacagattcacacttgggtgataaaactatacagaaagaaggaagtgatgtctacaaaagacaggacagtgactactctgggggaagaggcctgtgactaggatgtggtccgtggcatggcttttggagggggtgttctggcaaagtactatttctcaaccagagttagggattatatgagtgttgacgttagagtgaaccattaggctattcatttgtttggtgtggcttttctgaacctgtggtttttttatgtaataagatagaattttttaaagtaaaaccaaaaaaagaaaagaaaaagaaatcttgattccattaattaaatatagaattaccaactgacccagcgattccactcctaggtataacttcgaaagaagtgaaaatagcccaggtgcggtggctcacgcctgtaattgtagcactttgggtggctgaggtgggtggatcacctgaggtccggagttcaagaccagcctggccaacatggcgaaaccctgtctctactgaaaatacaaaaatttgccagtgcgtagtggcgcacgcctgtaatcccagcactttgggaggtcgaggtgggtggatcacttgaggtcaggagttcaagaccattctggccaacatgacgaaaccccatctctactaaaaatacaaaaaaagtagccaggcgtggtggtgttcacctataatcccagttactcaggaggctgaggcaggagaatcgcttgaatccaggaggttgcagtgagctgagatcacgccactgcactccagcctgggtgacagagcaagactccatctcaaaaaaaaaacaaatttaaagaaaaggaatcttgaccactttggatcaaacccgtctgctaggttagtcaatttatttgcaaatgaggaaactcttaacatcatcaccaccaatgaggcagcctgggacaagagccttgttcaccagccgacgggctttgcaggtggtcagtaaacaacgccgtgcttcgcacaccgcgtgtggacatgactagctgccagcgctttaaagcccatccttatcagacctccgagtaaaaatgttttccttccccaggtaagcccttggaaacactcggtaataaagcctattaaacaaccattctttctgggctacactcaataagccatggagtcattaaagatccaagaccctcctcgcctgggacaaaacgagaggcaaagaaacttctaggataaagaagccacagccaggcgcggtggctcacgcctgtaatcccagcaccctgggaggccaaggcgggcagatcacaaggtcaagagattgagaccatcctggccaacatggtgaaaccctgtctctactaaaatacaaaaaaattagccgggcgtggtggcgggcgcctgtagtcccagctactcaggaggctgaggcgggggaatcccttgaacccgggaggcggaggttgcagcgagccaagatcgtgccacagcactccagcctggtgacagagtgagactccgccaaaaaaaaaaaatagaagaagccacaggaccctctaccccaaaccctctaggtaggtacttgacaatggtgggcttcacctaccacatgccctacagtgtaattttttatttatttatttgtttatttatttatttaattatttgatacgaggttttgcttttgtcacccaggctggagtgcagtgacgtgatctcgactcactgcaacctccacctcccgggttcaagcaatcctcctgcctcagccccccgagtagctgggattacaggttccaaccaccagcccggcttatttttgtatttttagtagagacggggtttcaccacgttggccaggctggtctcgaactcctgacctcaagtgatctgcccgcctcagcctccccgagtgctgggattacaggcgtgtgcctggcccctccagtgcaaatttgatgatcatgctaagtccagtgtgttgaaagactttggtccacttcccaaacctgtgattggaggaaggtggcccaatctgcagccactcctcgggccccaggatgataggtaaccagggagcagaggagagcaatgctttcaacactttcttgtttgcttcccactcttgacatcatttatgtttaaaaatgagcaaacgggccgagtgtggtggctcacgcctgtcatcccaacactttgggaggctgaggctggtggatcatttgaggccaggagtttgagactagcctggccaacctggtgaaaccccgtcttcactaaaaaatacaaaaatcagccgggcgtggtggcatgcccctgtaatcccagcactcaggaggctgaggtaggagaatcgcttgaacctgggaggcagaggttgcagtgagccgagattgtgtcactgtgctccagcctgggtgacagagcgaaactccatctcaaaaaaaaaaagaaaaaagaaaagaaaagaaaaaaggaaaaggaaaaatgagcaaacaggtcggcctggtggctgacacctgtaatcctaacactttgggcttcccaaagtgggaggattgcttgagtctaagagttcaagaccagcctgggcaacatagcaaaatccccatctctacaaaaagaaaaatttaaaaaataaattagccagggatggtggtgcgcacctgtagtcttagctaatgggggaggctgaagcgagagggtcacttgaggacaggaatttgtgagctgcctgggaaacatagcaagactccatctctttaataaataagtaaataagtaaataaaattagctgggcgtggtggcatgcacccatagttccagctactggccaggctgaggctggaggattgcttgagcccaaaaggctgaggctgcagtgagctatgatcgcaccactgcactgcagcctgggtgacagagcaagaccccatctcaaaaacaaacaaacaaacaacaaaataaaaaagtagagagggaagacagaggaaaggggagataggataaggggtacaatcttgaaactccagcacacacatcacctccttttactgggaaatgcacggttctatctgacacaggcgcattgagagaaacagatcactgaaggacctgggctgccagcctgacgcacaggcgctcgctgacttccttgggtcctccccggggcatttcaggtgttcagtcacaaagaacagattttaattctgacaaagggtcgggtgacatgggaagtaaccggtcagtgagtatcaggtaggaggaaggaaaagaaaaacttgtcaggccagtcaccaagttagcagacagccaaagggaaagccgcctttccattacgatggattttaactctacccgccttcttcccaaaaggattgggccaaaaggtcagtttcaactgatagccctcagcctcccccggcccccctccccggtccccgcacccacccgctccaggaagccaggcaatggtgggaattgtaaattcgttatcttcaccactcaagatttagacagcatcatctctggggcagccaagtgaccacacggtcaactggtctaccatctttcagcgcagccttgaacccaccaaaacactttctgcccacccatcagcttatctaacctgatagttactttgacttcctccctgactcagcaaggacttcggggacgcaacaaaaagcctggctcagcaaggctgtccactcagtattggtggaaacagcccctcctaaacacagcccctgtgtgaccttcatgacggcattggagcccataaggaccctgcactggtccaagcctcccttcccggcatgaggcaccctcttcactcttgcccacaaaacgcctcttggccttctctttgccatttcatccacccgaatacccttccctctcaccctgtcttttctttttttttttttttcttgtcttgtcttttctctttctttctttctttctttccttccttccttccttctgtttttgtttgtttgtttttgagacagggtctcactctgttacccaggctggggtacagtggtgtaatcatagctcattgcagcctcaaagtcccaggctcaagcgatcctcccacctcagactcctgagtagctgggactataggcacacagcaccatgcttggctaattttttaaaattttttgtagagatggggtcttgctatgttgcccaggctgagctcgaattctaggttcaagtgatcctcctgcctcggcctcccaaagtgctgggtttacaggtatgacccaccacacccaacctcatcttctttctttgtgatccttgccacccaaaccaaagcacatctctgccactccaatctggaacaatctctcctcttttacaaaggccaacggcaattcatcttcaacccccggaagaggagccgggagcccagaaacatactctctagggtacttgttctttcctgctctacaaaatccaatcatctccaaagtgaaaagtttgtttaaaaaatttcaatcaaatttttaaaatttattttattttaaaataaaataaaaatgaataaataagggctgggcatggcggctcacgcctgtaatcccagcgctttgggaggccaaagtgggaggatcacctgaggtcaggagttcgagaccaccctggccaacatagtgaaaccctgtctctactaaaaatacaaaaaaaacacaacaattagccgggtgtggtggtgggcgcctgtagtcccagctacttgggaggctgaggcaggagaatcacttgaacccgggaggcaggggttgcagtgagccgagattgcgccactgcacttcagcctgggcaacagagcaagactccatctcactaaataaataaataaataattccaatcctggctggcacagtggctcacacctataatataatgcaacagtttgggaggttgaagcaggtggattgcttgggcccagcagttcaagaccagcctgggtaacgtggtgaaaccccatgtctacaaaaaatacaaaaattagccagcatggtggtgcgtgcctggaattccagctactcaggaggcggaagtaagccaagattgcgccactgcaccccagcctggacaacagagttgagacccttgtctcaaaaagaaaaaacaagaaaaaaaaatgccaatcatctgagtgaaaaatgaattacaactactgtggaatttttttcagtacagttttttttgtttgtttctctcctagattttttttttaaagatctttgacaacataaaagggaagaaagacgaatgagagattcaagtgggccatcattcacgttacatgctctaccctacctttttttttttttttttttttctttttttgagatggagtctcgctgtgacacccaggctggagtgcagtggcacaatctcggctcactgcaacctccgcctcctgggttcaagcgattctcctgtctcagtctcccaagcagctgggattacaggtgcccaccaccatacccagctaatttttgtatttttagtagagacggggtttcactatgttggcccagggtggtctcgaactcctgacctcagttgatccacccaccttggcttcccaaagtgctgggattacaggcctgagccaccgtgcccggcctcccccaccttatctttttctttttgttggatccccgtgtgcaggcgttacactttcctgtcttctgtatggacgacagtgacatcgccacaagggaatttatcaatattccctgttatctagagaacatcatgatttccaggtgctctgctccaaacacgtctagaagcacgggttcgatgactcactcgaaggggaaaggcggggtgggaggagggaggagggtggagtgggggccttgccttgtacatatactgccctcctccacccaaacagagagctccaaaaaaaaaaaaaaaaaatgctaatcatctgagtgaaaaatgaattacaactactgtggaatttttttcagtacagtgctctaccccacatttttttttctttttttcttttttgagacagagtctcaaaaagtaaggaaggaaggaagaaaggaaggagggaagaaagaaaaggaaagaaaggaaggaaagagggaaggaaggaaggaagtaccagcaaagggcagctgggctgtatggcctcaggccgtggtgctcccaagtcccactgaaacagcctctatccctgaatgctgaatgtccagctcatatatagacagagtctcaccctgtcacccaggctggagtgcagtggcgcaatctccactcattgcaacttccgcctcccaggttcaagtgattctcctgcctcagcctcctgagtagctgggattacaggtgcccgccaccacgctcagctaatgtttgtacattttttagtagagatggggtttctccatgttggccagggtggtcttgaactcctggcctcgagtgatctgcccgcttcggcctcccaaggtgctgggattacaggcatgagccaccatgcccggccaaaaatgtgaaaaagcattcttaagccaggcaagcacagtggctcacgcctatagtcccagcactttgggaggccaagaaaggaggattgcttgaacccaattgtttgagaccagcctgggcaacatagcaagaccccatctctactaaaaaaataaaaagaaattagctgggcgtggtggtgcctgcctgtggttccagctactgaggaggctgactgaggtggcagtggcctatgatcaccccactgcactccagcccaggcgacagagtgagaccccatctctaaaaataaaaataaaataaaaaattcttagctcataggtcatacaaaaatagcagctggcggactggatttggcccacaggtcgtagtttgctgatcactgggcaaaggccttacgtcagacaagtctgaagtcaaaccattccccagctaggtctcctagagcaagtctcataattcctagccatgcctcagttccctcttctgtaaaatgaggataacaaaccctcataggctgtgatgggatcccctaaggcattgcttagcacatagtaagtgctcagtaaacactagctattgatgagtgttaaggatgtcattgtcaactgtgagccaggtactatgacaggtgcttgagatacaacaaagtccctgccttcaggagagcttagtctgataggagaggccctaagtcaagacagaatgagaaggctgataagaagaggcaacacacatgttggcaggggcaaattctagatttcctctccagtttcttttccttctttccttccttccttccctccttcctttccttcttccttccttccttccctccttcctttttttctttcctccttccttccttcactccttctttcatttctccttccctcctttccttccctccttccttcctttctttcttccttcctttctccttccctccttctttccttcccgccttccctccttccttccttcctttctttccttttatttcttccctccttccttttttccttccttttcttttctttcttccctccttccttccttccctccttccttcctttctttttacagtttcctgcatttcaccaacttcccgcaatgacatctataagacacaaaggtaaagagcttggattctgagccagaatccccagcttcaaatcccatctccactacttactacccatgtgtgtggggtgcgcggcggaaggggtgggcggggcagtgttggaagtagaagttgcttaacctctcgaagccttagtggtctcaacaataaataagattgttgggaagatgggatgcaatatcctaatcaaagcacccagaaccacggctggcatgaaatcagcatttgccacaaagacaattccgattgttaaaataccaaggcaagcccagagtagtggttcacacctgtaatcccagcactttggtaggccaaggcaggcggatcacttgaggccaggagttcaagaccagcctaggcaacatggcgaaaccccatctctactaaaaatacaaacattagccaggcatggtggcacgtgcctgtaatcccagctactcaggaggttgaggcagaagaatcgcttgaacccaggaggcggaggttgcagtgagctcagatcatgccactgcactccagcctggacaacagagcgagactctgtctcaaaaaaaaaaaaaagaaaaagaaaacaaaatcaagtcaagtccagcgtggtggctcacatgtgaaatctcagcactttgagaggctgaggtggggggattccttagagtccaggagtttgagaccgacctgagccacatagcaagactcccatctcaatttaaaaaaatattaaaaactaaataaaaatgtaaaaaaataaaatatcaaggcaaactttttaaatggaagaagaaaaagaagcagagagtttccataggcagctaaaaattctgccaaaaatcaaaccctccaagagcatgcatttaaactcgtgcatttaaatacgtgatatttaatgtggtaggcacaataccacactttgagagactttgactcggagctgtaatctcagacccagggaggagggatttgctgctttcagcctccccctcctgctttggtgccgacgtccatatgtggcatctcgggttggtttcccctggcacccagcatgtcccggcctcacccacccctctggccggcagtgagcagctggggtgacctcccagaaagaaaatgccagtgggtttggctaaagcagctggtcaggcaagccctgtggcttctggtcccctcaaaatgcccagagctgagaatttccagagcatcccatgctgttggcacccaaaaatcagggtggtcttccctctggggctggaggtgtggcacccatccctcatcagcaggtcgcaagatacatgttcctctgcctgcctcaaaaccaaagtcagaaatgaggctgagccctggtagatattcacctggaagctagtctgcccagatagggtgggcccatggtgcttacttactggaagcttccaggacactcacggagcacctgaggctaggttaagtgcctccccctgcaccatctcattcaacccccacaccaccaccctaagaagcaggtcccataatgacccccatttttcagatggagaaactgaggcttgaaccagcttgtgaccagtcaatggtaaaacgagactggaagccggtgctgcttgcctcaaagaacttcttttttttttttttaaagacagagtctcaccgagtctcactctgtcgcccaggctggagtgcagtggtgtgatctcagctcactgcgacctccgcccccggggcccatgcgatcctcccacctcagccttccaagtagctggggttacaggcacctgccaccatgcctggctaatttttgtattttttgtcgagacggggtttctccatgttgcccaggctggtctcgaactcctgagctcaagcagtctgccctcctcggcctcccaaagtgctggcattacaagcatgagccaccgcgtccagctggctgaactaatgtagatctccctctaactctccccctcttctgagtgtacttggtttgatcgtgaacatctgcatttgccactagactggccgctctgaggaggcaaaggctggctcccttcctatgccctgagcgccccagaacatgacacctagtaggcagtcaataaacgaactgcatagaccccgtctccactcttcccatgtaaggcttcgtgcattggacctctcctggtatctttgccccaaatccattgcaggataatggagagagggtgtccaggctatggatcattagcacatgccatgtttttttgtttttcttttaattcccctaaccatttttttttctttttttaaaaaatggagtttcactctgtcggccaggctggggtgcaatggcacgatctcagctcactgcaacctctgcctctcgggttcgagtgattctcctgcctcagcctcctaagtagctgggattacaggcgcccaccaccacgcctggctaattttcatatttttagtagagacagcgttttgctatgttagccaggctggtctcgaactcctgacctcaagcgatccacctacctcggcctcccaaagtgctgggattacaggtgtggggcctccacacccggcccccttaaccattgaaagcctttttttggtctccctgtaaaaagtgcttaagggacaggtagaagaaggggtggatgttgctcggaattgcttaaactaggtccaaaggacaaaccagcaccttcatcctaaatgttgatgcattcccctgatgcttccagaagctgccaagtgtggaagacaaaaatagcaactacggatgttcacagaagtatctgaaaagactctgggggaaaagaggggttgatggatagttttctccagcccatttctgtcacctaagacaggggagtatcctctgaaggctcaatctattctgtattcaaaaatcccatcagacatcaaataagcctcctaaggctgggcgcggtagctcacgcctgtaatcccagcactttgggaggccgaggccagtggattatctgaggtcaggagttcaagaccagcctggccaacatggtgaaaccccatctctactaaaaatccaaaacattaactgggcgtggtggcaggtgcccgtaatccgagccacgcgggaggctgaggcaggagaatcgcttgaacccgggaggcagaggttgcagtgagctgagatcgcaccattgcaatccagcctgggcgacgagagcaaaactccgtctcaaaaaataaataaataaataagtttcctaaagcctcagcaacaaggttaatgcaggcattgaaaagctagatgcgtcaacagcagtggccctgattcacaatggcagaaatgtgaaagcgaccaagtgcccgtagatggatgaatacacaggcaaaatgtgctccctccatacaatggaacatgattcagccttaaaaaggaaagaatttccgacacaggctaccacgtggatgaaccttgaggacaacatgctcagtgaaataagccaggcacaaaaggataaatcccgtctgattccactcacaggaggtccctacagtcatcacattcatagagacagaaaataggatggtaggtgccagggggctgggagagggagatggtggagtgagtgtttcatggggacagagtttcagtttgggaggatgagaaagtttgggagatggtggtggtgatggttgcaaaaccacgtgaacgtgcttaatgccactgaaaactgtggacttaaaatggttaagatggggccaggcgcggtggcactcacctgtaatcccagcactttgcgaggctgaggtgggtgtattgctcgaggccaggggtttgagaccatcctggccaacatggcaaagccccctctgtcctgaaaatacaaaacttagccgggcatggtggctggtgcctataagtcccagtcactcggaaggctgaggcaggagaatcatttgaatccaggaggcggaggttgcagtgagctgagatcacaccactgccccccagcctaggtggcagagcaagactccatctcaaaaaaaaaaaaagttaagatgaaaaatttattctatgtgtattttatcacaatacaagaaattgaagaggggaaagaaagctgaagctgagttgctctcaaagacaggggcaacagttcaaaaaacaatcattttttggccccctggggatactgctactaatggatggctgagatatataccacatgccaggaacccggtaccccgggaagtgttagtcgcaccttctccgggtaacaaaacccccagtactggaaaaacaagcccggttctttttattgttttgttttgtgttcatttttgtttttgttttcttttgtttttgagatagagtctcagtttgtcacccaggctggagctcagtggcatgaacagggctcagtgcagcttcgacctcctggacacaaaagcctggttcttaatagcaaagcaatttttaattcactcaaaacatcaggcacagccaggcacagccaggcacagtggccgatgcatgtaatcccagcactttgggaagccgaggtgcttgagctcagaaatttgagaccagcctgaccaacatggccaaaccctgtctctacaacatacacaaaacttagctaggtgttggccaggcacggtggctcacccctgtaatcccagcactttgggaggccaaggcgggcagatcacctgaggtcgggagttcgagaccagcctggccaacatggagaaatcccatctctactaaaaatacaaaattagctgggtgtggtggcgcatgcctgtaatcctagctactcgggaggctgaggcaggagaatcgcttgaagccaggaggcagaaattgcggtgagccaagatcatgccattgcactccagcctgggcaacaaaagcgaaactccatctcaaaaaaaaaaaaaaaaaagtagccggatgtggtgacacctgtaatcccagctacttgggaggctgaggcaggaaaattgcttgaacctaggaggtggaggttgcagtgagccgagattgtgccactgtactccagcctgggtgacagaacgagactctgtctcaaaaacaaacaaacaaacaaacaacagcaacaacaactgaacacccagcagggagcaggagactcaattgcagataacaccattctggatattttgtctaaaacagatacaaaaataaattcatagaggaatgtcttaaattatatctcaagataggtaggcctagagcttttcaaacaagcactacatttggaaaactcagtaatagaataaaagaatgttcactgtttcccctggtgtcccagctagaagcagctcacttgtttctaaacagagaggacatccttcccactcctccaaaaaatcatagcttttattctggtgtatgtcttgcataaatttggcacaaaccccagttctgtcttttattagctgtgtggctctgggcaagttaagtaacctctctggtcatagtttagcttctccttgcccctgacctacaatattctcaggatttttccacagtgcaataataacggtcccctctcccaccacccttcactaacccatcttcctttttcaactatcccactcccgatttccaaccatccaacatgtcccatggaaggactcatgctgggggctccaagggagtcctcacagacaattccaaggattctatttaggtctatttaaggactcactcactctgggtggcttccccagagcgttgggctcagataagaagatcctcctttctcccctcccttctatcttttgtgatacaaccctcaagccacccacttaacttcttcccacctccatcgcatgttccctagttcttcccagggaaatgtgaaaagaagtccatgaaacaacaaacaagtaatgtgtgaatgtggaattgcctccttgagcatgaaaacatgataaaactaccatgatcagaacagtcactaccatgatcagaacagtcaccgctctgtggcatggagaggcagatctatggacacaccagaaacagaccccaaagcaatggcaaagaggtagatttctataatcaacagctgtctgaggcccccagttagctatttgggagagaaacgaaacgcccgttgagtcacacacacaaacagatctcaagtagtgaggatgaatttttttagataataataattaaaatataggctgggcgcggtggctcacgcctgtaatcccaacactttgggaggccgaggtgggtggatcacctgagagttcgagaccagcctggtcaacgtagtgaaatctcgtctctactaacaatacaaaaattagctgggcttggtggtgggtgcctgtaatcccagctacttgggaggctggggcaggagaaccgcttgaacccgggaggcagaggttgcagtgagccgagattgcaccatcgcactccagtcttaacaacaagagtgaaactccatctcaaaaaaaaaaaaaaaattaaaatataaaatgtagagaaaaaaaacctttcatgggtagaagaagactttctaagtgtaaagtacagaagtggcacactgaaatccagctctgaactccataaacattttaagcttctccagcaaaacacttcccagagcatttaaaccactgaacaacaaaaacaacaaaatgcaattggcaaagggttagtagccttcactgatgaaaaccacatacagattaattttgcaaaagctactgaggtactaaaagacaaatgggcaaaggatatgaacaggaagagaaaactcaaatgataaataaacatgttttaaaaggttcaaccccgatagcaatcaaagaaatgcaaatagaaacaatgacaacacgtcagctcctccctcccgcagtaaattatgaaagatttttcaaataacactcaaagctggccaaggtgttccctctcctccaaagctaggaggagtggccgttggcacaacatttccggaacaccatttgtcaatctgcaccaagagcctctgacccagaaattgcacttctggaaagcaagcctaaagaaacaactgctagataaagctttgactctaaaatgttcatcactctctttgtgaaaactagaaattatctttttttttttttttttttgagaaggagtttccctctggttgcccagggtggagtgcaatggcacaatctcggctcactgcaacctccgcctcccgggttcaagtgattctcctgcctcagcctcccaagtagctgggactacaggcgtgcaccgccacgcccggctaattttgtatttttagtagagatggggtttcaccgtgttggtcaggttggtctcgaactcctgacctcaagtggtccacccgcctcagcctccccaagtgctgggattacaggcctgagccaccgtgcccggcctggaaatcatcttaatgcccaataacaggaatggttaaggaaaccttcagtagacacgacagattcctgaagatcactagaaggaacaacccccaataaactactctcggcgacatgcgttgtggaataagatgaatgttttgcttttttttcgtttacaagtgtctttttccaaatgtctattataagcaatatcacttctataatcagataagaactaaactatttttttaaaaaaaccgaatctacagttttccactccttttcctctcccaagcaagaagaacattcactgactagcacaggcggtggcaaactgctgccctcgagcaaaatccggcccacgacttgtttttgtaaataaagttttattgaaacacagccacagtcatacatttatgcatgcctgtggctgcttgtccaatacagtggcagaattgagtcgttgcatcagagaccatatggcctgcaaaatctgaagtatctactatctgagtctttacagaaaatgtctgccactccctgggctagtgaatgccaccacccactattccccggcccctacctaatgaccatttaacatttttaagccataaaacattttaagctttctagaacaaggcacgagacactgcttagaaccctgtatccccggcgtacctttctggcagtgactatgagtccaacatcgttcgacaaactgcccgttgatgacggtggcggggcagttggtcttgcccttcgcggtacccggacagatgtctccacactcctcgttgtcatctttgttcaacacgatgtaattatcctccacggaatccaggatacgggaccagtcgatagtggccaagtaacagagctcattgttcttctcgatgcggacagaaccccgggtgatgttcatcaggttgtagaggccgagttccttgaggtgaaccatctcgaagatgaccagcgcgtagttaaagaacagtcgtgatccccggatgaccgtgaggttggggaacaggtccttcaggctctcgagcccatagacccggaagagcagcaagtaatcagtgatcatgatgagtttggggaaactgaggtctcggaaatcttcgggcctcgttttgaacatcaagagtatctgcaagtgtccttcgatgacagagcaattctccagctcatgcaacctagtgaggttgttccggatatccatgccgggacacactacaagagaaaatgaacagaaagcaagacaggtgagcagacgcacggtggatgcatcagaaggatcaggggcagagccggcttcatggacaggaaacctgggccctgtgttttcatcccgggccctgtaaactctgcagccagccgggatgagtagctttctctgtaaagtacccatgcctaagtaattactttcaaaacgccaagaaaataattcttttggcaagccctgttaaaatccttaaaatcaccacctctgaaatgatgcagtcgggacaatgggattacaggggattgagtaacgcggcaggtgcagaaggagaaaggggaactgtctccagtgcgtcaacatagaagatcttcaggagataatttacggggataaaggtgcccgcggtcagaaatggggcaaggaaagctaaatgtatttgttttgtcaatcctcccacctcgctggctgactttccttcccggactgctctcctgacctgcaatcaagacctaattaccttttacctgggtgtggtgagggcttcccagggagcccgatctccattgcccaaatgccctgagttctcattctcctgaaggcggtccctcccaggccccaacgcccaccatggctccccatcatcctgcacttccctcaagattctgcccctacatcccctgcacaccactaaacaggcctgcccacaactcttgcacaactccaagactcctatcctcctctgtaacatggcttatatggaagaagaagtgaaacaactcagggcaagcactcaaacagtgcctgagacatagtaagtgctgcactaatgtcagctattttgttgtttgttgttgttgttcttcttgctgttgtttattcccccaaacatataacagtcatctctaggctagtctatcttttggctggcgaagtgctttgtaccttagctccctatttctaaatccagcccatcatgcttcaagatatccagttcaaatgctgcctcctcctccaggcagccgtccctgatttcctttccttggcacacctatttgcgtgtttctcctccttgtgtcccttacacctgagttaacgtttttcaaaattgaagtctttagatggcttctctctgccaacacacccacacacccacacacacacacacacacacaccgcctccccaacacacacaccacagtcctcagcacctagaatataaggctcagtatacaacccctgcttattttgttccaaaacactaaaccttccaccaatatctttgaggaaaacagattgttctaaagaagaatagtaaatcctctaaaaaaaaaaaaaatccaccctgagaattacccacaaaagaagcacaaattagaaaaaacaataacaacgacaaaacacagcaaaagcaaacaaatgggaaaaaaaaagtagcagtgatcctggatcacattccatgcagcaaatggattaggctaagtcgagaaaacacacacacacacacacacacacacacacacacacacacacacacacacttgcttgctaggaagttggaggaaagccccagtacacaactatggattaatctccaccctcccctcaacactggctgcctggggtctgaaccaagcaggaaccctgcagggaccaagctcaggctgggaggcagcttcaagaggacaaggatgccagtcccagcccccccacccctcctagtcagggacccaaccccagtctgaggctcccagtcagtcacatcaacagcttccacatccagagatgtcaaagaaccccgcgtgccattggtgcctcccagcaagttctgtccccatcccatagatgagaaaactgaagctccaagaggcaaagaccatcactcaaggacacacaactcaccagtgactggcagggttgccagacttagcaaagaaaaatgcagaatgcctagttgaatttgaatttcagataagcaataatacctttttgaggataagtatatcccatgtaatgtttgggacataacttaccctaaaaaaaattactcattgtttctatgaaattcttgtggggtttttgttgttgttgttttgatgtggagtctcgttctgttgcccaggctgaagtgcagtgccgtgatcttggctcactgcaacctccacctcctgggttcaagtgattttcctgcttcagcctcccaagaagtgtccaacaccacgcccagctaatttttgtatttttagtagagacgggatttcaccatgttgaccaggatgatcctgatctcctgacctcgtgatccacccgcctcagcctcccaaattgctgggattacgggcataaaccaccatgcctggctggcatcctaatcttagatttggccatagccctgggcttctcaaccctgagtcccacactatatttcatttctctctctctctctctctctctcacacacacacacacacacacacacacacacacacacacactgcaggtagaaagaacacttggccgccatcctccccaggctatggcagaaccaaaatcagacatgaatatgcattcaaaggttaactagggctgggcacagtggctcatgcctgtaatcccagcagtttgggaggccacagtgagaggatcgattgaagccaggagtttaaagtcagcctgggcaacatagcaagaccccaactctaaaaaataataataataattaaatatccaggcatggtggcatgtggttgtaattccagctacttgggaggctgagacaggaggatcacttgggtccaggaataggaggttacagtgagctgtgatcacaccactgcactccagcttgggcaacagagtgagacctcgtctcgattaaaaaaacacaacggctgggcgtggtggccagctcatggctgtaatcccagcactttgggaggccaagatgggctgatcacgaggtcaggagatcaaaaccatcctggttaacacggtgaaactccgtctctactaaaaaatacaaaaaaattagccaggcgtggtggcgggcacccgtagtggcaactatttgggaggccgaggcaggagaatggcatgaacccgggaggcggagcttgcagtgagccgagatcacaccactgcactccagcctgggcgatggagcaagactctgtctcaaaaaaaaaacagaaaaaaaggaaagattaactggctgttggacattagagaaatacaaattcaaaccacagtgagataccactttatccccactaggatagctaaaaccaaaaagagtgacaattacaagtgcaaagaatgtaaagaaatgggccgggcaccgtggctcacacttgtaatcccagttctttgggaagccaagataggcagatcacctgaggtcaggagttcaagaccagcctggccaacacggagaaaccccgtctctactaaaaatacaaaaaacaactagctgggcgtggtggcaggcgcatgtagttccagacacttgggagtctgaggcaggagaatcacttgaacctgggaggtggaggttgcagtgagccaagatcactgcactccagcctgggcgacagagcgagactccatctcaaagaaaaaataaaatgtagagaaactggtatccttttgcattcctgatggggatgtaaaacagtgcagccactgtggaaaacactctggtagttcctcaaaatattaaaccaagaattgccatatgacctggcaattccactcctaggtaactacctaagagaaatgatactatacgtccacacaaagacgtgtacacaaatgtctatagcagcattattcataatagctgaggctgagtgcagtggctcacgcctgtaatcccagcactttgggaggtagagacggaaggattgcttaaacccaagagttcaagaccaacctgggcaacatagcgagtctccatctctataaaaatttaaaacattagctaggaatgctggtgtgtgtctctggtcccagctacacgggagactgaggcaggaggatcgcttgagcctaggaggtcaggactgcagtgatctgtgtttgtacccctgcactccagcctgggcaacagagcaatatcttgtctcaaaagtaaatacaggctggccgcagtggctcacgcctgtaatcccagcactgcgggaggccgaggtgggcggatcacgaggtcaggagattgagaccatcctggccaacatggtgaaaccccatctctactaaacatacaaaaaaaattagctgggcatggtggcgagtgcctgtagtcccagctacttgggaagctaaggcagaagagtcacttgaaccagagagttggaggtttcagtgagccaagattgcaccactgcactccagcctgatgaaagagtgagactccgtctctaaataaataaataaataaatgtaaataaaaggccagccacagtggctcactcctttaatcccagcgctttgggaggctgaggcaggtggatcacctgaggtcgggagttggagaccagcttggccaacgtggtgaaaacctgtctctactaaaaatacaaaaattagctgggcggggtggcgcatgcctgtaatcccagctgctacggaggctgaggcaggagaatggcttgaacctaggaggcggacgttgcagtgagctgagatcgtgcctttgcactccagcctgggtgacagagcaaaactccatctcaaaaaacaaaaaacaaaaccaaaaaaaccccacgaaacaaaaacaaaaacaaacaaacaaacaaaaacaaaacaaaattatgcctccagtatagctggaaccacagacatgcaccaccatgcccagctaatttaaatttgttttgtagagatagtggtctctctatgttgcccaggatgctctcaaactcctgaactcaagcaatcctccagtcttggcctcccaaagtgctgggattacaggtatgaaccttctccataaaagaagtcaaacagagaaggccacatgttgtctgactccattcatacaaaaaaatccgaaagaggcaaatccatagagacagaaaatagattcgtggctgccaagagctagggaaatgggggatggaaagtagtagctagagggtacagggtttctttgaagatgatgcaaatattctaaaactgactgtggtcacagttgcacaactgtaaatgtcctcaaaaccacctaactgcacacttaaaatgggtgaattgtatgtcatgtgaattctgtctcactaaagttgttatgagtaaagattaaacagctataattgtagggaacaatcaagaattgcttttctttttaaatatcctatgaatctaactcttaattcattaaagccgtatgtgtccctattagtgaaagacaatagagcagtttaccactgggacagaaaatacccagaggatgttagaaatgaaggcagaaatagacacgaggacttctgctggcttttaacatctctgagtgggcgtgaaggatgcttcaagttcttcataatgggtacctggttaatggccactctttgtacaggtagaaaaaggcaatgaggaagagggtgctaagtgacagctaatattttcttttttctttttttttttttctttaattgagacttgagtcttactctgttgcccaggctggagtgcagtggcatgatcttggcttgctgcaaactccacttctggggttcaagcaattctcctgcctcagcctcccgagtagctgggattacaggcgtgtgccaccacacctggctaattttgtatttttagtagagatgggatttcatcatgttggccaggctggtctcgaactctgacctcaggtgatccgcccacctcggcctcccaaagtgctgggattacaggcgtgagccaccgtgcctgaccaccatctccgtactaaaatatgccgaatgggccaggtaccatggctcacacctgtaatcccagctactcaggaggctgaggcaggagaatcgcttgaacccaggagatggaagttgcagtgaactgagatcatcccgtcgcactccagcctaagtaacaaagcaagactccatctcaaaataaataaataaataaataattcccacatataatcaatcctaaaaaaaaaatgattaatgagatagtccacagcagtggtccccaacctttttggcaccagggaccaatggtagaagacaatttttccacgaacacgggatgggtggtgatggttttagaatgaaactgttccacctcagatcctcaggcatcagttagattctcataaggagcaggcaacctagatcccttgtatgcacagttcacgacaggattcgagctcctatcagaatctaatgctgccattgttctgacacgaggcggagctcaggcggcaatgctcacctgccctctgctcacctctactgtgcagcccagctcctaacaggacatggactgctactggtctgtggcctaagggttggggatccctggtctgcaggatttttttcccatgacgcctacgagatgtggtgtgtgctttaccctggcagcccatctcgaaacggaggctcatttttctttaaaaataattgatttgtcgcccaggcgtggtggctcacgcctgtaatcccagcactttgggaggccgagtcgggtggatcacgaggtcaggagatcaagaccatcctggctaaccatgtgaaaccccgtctctactaaaaatacaaaaaaaaaatagctgggcatggtggcaggtgcctgtagtcccagctacactcgggaggctgaggcaggagaatggcgtgaacccaggaggcggagcttgcagtgagccaagatcaggccactgcactccagcctgggcaacagagtgagactgtgtctcaaaaaaaaaaaaaaaaaattgatttgtctatgtagattttataaagagtatcatcgaaaatgtaggtttgatgtagaagaggcaagccccaaaattgagccttaccccgggagggtttttggcttcacccaggaaagaattcgagggtgagctggtggtgttagacagcactttttttttttttggtcagagagggagtttcactctgttgcccaggctggaatgcaatgacatgatctcggctcactgcaacctctgccgcctgggttcaagtgattctcctgcctcagcctcccgagtagttggtattacaggcatgcactaccacatccagataattttgtatttttagtagagacaaggtttcaccatgttggccaggctggtctcgaactcctgacctcaggtgatccacctgccttggcctcccaaagtgctgggattacaggcgtgagccactgcgcccggccagccctgtccttgtggctagtcctccatttggtccagggctggatccccgcctctggagacgagtcccgcctactacctcaagttcacataaccaagttgttccaaatatatgggagagttttccagtaacagaactgagtactaattttttttacatttccatgaattaaataaaagtttacattgacatttcaatgaattaaagtgaaaataaaattcagtttcagccaggtgcggtggctcacgcctgtaatcccagcactttgggaggccaaggcgggtggatgacccaaggtcaggagtttgagatcagcctggataacatggtgaaaccccgtctctactaaaaatacaaaacttagcggggtcgggggagtggcgcatgcctgtaatcccagctactagggaggctgaggcaggagaatcgcttgaacctgggaggcagaggttgcagtgagccgagattgtgccattacactccagcctggatgacagagcgagactccatctcaaaaaaaaaaaaaaagaattcagtcttaccagccacaacttccagggctcaagagccacccgtggatggtggctgccatattggacagagcagatacagagtatttccatcaaagcagagctgtattggaccgtgctggtcctgaatctgagaattttccagaaggagagaaggcggacatgagagccatcttaggaagtgttcctttcttccctgattttctctccatcatgaaaacagcaggggagatgggttgggagcagggcagagaaagaactttctagaagattctgaaatcctttacaatgctaagagttttctacttcctgttttcaatcataaaggtccttgttcttcagttacaggattttttttttgagacagagtcttgctatgttgcccaggctggagtgcagtggtgcaatcatagctcactgcagcctcaaattcctgggctcaagtgatcctcctgcctcagcctcccaagtagctgggactacagctgcgtaccaccatgcctggctaatttttgtattttttgtagagatggggtttcaccatgttgcccaggctggtctcaatatcctgggctcaagcagtcctgcgtcggcctcccagtgtgctgggagtatgggtgtgagccatcaagcccggccagtaacagcattcttaaaatgctccctgctgacctattctggggcccacacgtccctttccacattctttccagtcctcaaactgcttcctcttaaattcaggaggtcctgcctcaacaagtcttgggttctggtgtcaggccaccacctataccagttttggggcacactagaaatctaacgaatctggcttcccaacccagctctgtcacctgtcaactgtgtgatcctggacaacatcttcaacccctctgcacgccttagtttcctttttatttatttattcatttatttatttttatttttgagacggagtctcactctgtctcccaggctggagtgcagtagcgtgatctcgaatcactgcaacctccatctcccgggttcaagcgattctcctgcctcagccttttgagtagctgagattacaggcgcccgccaccacgcacagctaatttttgtatttttagtagagacagggttttgccaagttggccaggctagtctcaaactcgtgacctcaggtgatccacccgtctagacctcccaaagtgctgggattacaggtgtgagccaccgtgcctggcctcagtttcctttaaatgatgacaacagcataatgaaacctacaaagaagagatgagaactggggtctctggctgtgtatacctgttctgtctcccatctgagccagatggaatccattcccagatttattacctccagaaattagagcttggacacactggggtgtcagagatccttaagattctccacctgcctgcaagaatagctttcaaatctacctctgcgagaaggaatggaggcgtctggatcaaatgcaggttctggacccggcaagtcagctacatggaaatcattcctgtattcactcagcaaacgtttgctgggcatctcggtgggccagacattgtgccaggcccagggggactctcaagacaaataaggttgcactcttacagcaagtaaaggaaagacgcacctaaataactgtgataagctaccaccagagctaaaggacaaagtactaaaacaaagaactgcagagatgttggccgggtgcagtggtcatgcctgtaatcccaacatattgggaggcataggcgggtggactgcttgagtccgggagttcaagaccagcctgggcaactggcaaaaccctacctctactaaaaatacaaaacatagccaggcgtggtgaggcgcgtctgtgctcccggctactcaggaggcttaggcaggagaattgcttgagcccaagaggttgaggctgcagtgagctatgactgcaccactgcactccagcctgggtgacagagtgagacactatttctaaaaaaaaccaaggccggacacggtggctcacgcctgtaatcccagcacttcaggaggcccaggcgggcagatcacttgaggtcaggagttcgagaccagccaggccaacatggtgaaaccccgtctctactaaaaatacaaaaaaattagccgggcacggtagcgctcgcctgtaatcccagctactcaggaggctgaggcaggagaaacacttgaacctgggaggcagaggttgcattgagccaagactgtgccactacactccagcctgggtgacagagtgagactcggtctcaaaaaaattaaaaaataaattaaaaaataaaaaataaaacaacaacaaaaagaaatgagaacagaagaatgcagatggaaacagtgaaccagtgaagacaaaggatgaaggaagaaaacaagtgtaatctgtaggacagaactgaaagaggactgtgatgaaaccctcatcatccagatcatagtccttccagaaacttatcatgtcattagtctcagaagatgtaccgaggacatctttggaacaaaccaagaagccagcaaggaggaagtcagtgaaagccctgggacctaaaagcaaagatgccccctcaggattcttcctccttgggagagaaaggcagatacccaactctggacattcataaggcagcaatttcaaaaggccggagaagaccaacaatttccagggatcatggacccaccagggaggatgagcttgagaaaacaggataccacagggtaaccaaaagagagccacacaggctgggcacagtggctcacgcctgtaatcccagcactttgggaggtcaaggggggtggatcacctgaggtcaggagtttgagaccagcctggccaacatggtgaaaccccatgtctactaaaaatatgaaaattagcctggtgtggtggcgtgtgcctgtaatcccagcactttgggaggctgaggtgggaggatcacctgaggtcaggagtttgagaccagcctggccaacaaagtgaaaccccatgtctactaaaaatacaaaaatgagtccggtatggtggcgtatgcctgtaatcgcagcactttgggagcctgaggtgggaggatcacctgaggtcaggagttcaagaccagcctggccaacatggggaaacctcatctctactaaaaatacaaaaattagccagggatggtggtgcacacctgtaatcccagctactcaggaagctgaagcaggacaatctcttaaacccaggagggagaggttgagtgagctgagatcacgccactgcactctagcctgggtgacagagtgacactccatctcaaaaaaagaaaagaaataaaataaaataaaataaaataaatatccctctagacagggcacagtggctcacatctataatcccagcccttggggaggctgacgcaggaggatcacttaagtccagaagtctgagaccaatctgggcaacacagtaagaccccatgtctataaaaataaaattaaaaaataaaaaagaaagagagaaacagccttctggcagcagaatgaagaaggtactgaagacagcatgcatagcaccacagaaaccaggggcagtttgtgtgaacaggacttcatacccaggagaaatggaagagaagagggagaagagagtgaggagggatcgtcaatgagcctgaagcattcgagataggaacagtttagagtggcaagaacaacaggctgagttggcagcatattgagtctgtgagggctttgggatactcagggatgtgggtcccgtgggcattgggaagatgggggaacaggtacggatgctggtggacgcagtgacaacaggtgatattgcaggaaaggtagcacggagacaactgagagaagaaaatgatagaaagagaggctcacgcctggaatcccagcactttgtgaggctgaggtgggtggactgcttgagcccaggagtttgagattggcctgggtaacatagcaaaaccccatctctaccaaaaaaaaaaaaattggatgggtgtggtggtgtgcacctgtagtcccagctactcgggaggttgaggattgctcgagcctgggaggtggagattgcggaggcctgacatcacaccactacactccagcctaggcgacagtgcgaggagaccctgtctcaaaaacaaaacaaggccaggcacggtggctcacacctgtaatcccagcactttgggaggccgaggcgggcggatcacgaggtcaagagattgagaccatcctggctaacaaggtgaaactccgtctctactaaaaatacaaaaattagccgggcgtggtggcaggcgcctgtagtcccagctactcgggaggctgaggcaggagaatggcgtgaacccgggaggcggagcttgcagtgagtcgagactgcgccactgcactccagcctgggcaacagagcgagactccgtctcataacaaaaaacaaaaaaacaaaacaaaacaaaggctgggtgcggttgctcacgcctgtaattccagcactttgggaggccaaggcaggtggatcacttgaggtcaggagttcgagcccagcctggccaaagtttgagacccgtctctaccaaaaatataaaaaattagccaggccgggcatggtagctcacacctgtaatcccagcactttgggcagccgaggcgggtggatcacctgagatcaggagttcgagaccagcctaaccaacatggagaaaccccatctctactaagaatacaaaattagctgggcatggtggcgtatgcctgtagtcccagctacttgggaggctgaggcaggagaatcgcctgaacccgggaggcggaggttgtgatgagccgatatcatgccattgcactccagcctgggcaacaagagcgaaactccatctcaaaaaaaaaaacaaaaaacccaaaaattagtcaggtattgtggtgcacacttataatcccagctactcaggaggctgaggcaggagaatcgcttgaacctggaaggcagaggttgcaatcagccaagatcgtgccactgcactgcactccagcctgggtgacagagcgagactcgatctccaaaaaaaaagaaaaaagaaagaaagaggggctccagggggcacagtatgaaaggccagggactaggaagggcacctgtgtcccacagccacccggacaccaacaccttctgtgaactctggaatgtctgactcctctagtctatgacatagttttgtaatcctaacaatatcaaacatcaaaccacaggattagaagggggcttccgtgctatttcaggagtcctgaaatttatacagacaagagcagacaggacacagaagacaggaggaaaaacaagagaagtcctgccagaccagaaagtcactttgtaacaggtggtatggagaccgtgtaactgggtataattaggagggaacatatgaggtcctcccttttctgatcttctgcaaggaaacaacaagatacatccttgagagtagaatgacaacaacaaacaaacacacacacacacacacagacacatacacaggcagtcagaaaacagttgtatcccaccaggcacagtggctcacatctgcaatcccagtgctttgggaggctgaggcgggacgatcacttaaggtcttgagttcgaggccagcctgggcaacacagccagaccctgtctctgcaaaaaataaaaataaaaaaactagccaggcatggtggtgcatgcctgtagtcccagctacttgggaggaggaagcgcgagaatcatttgagcccaggagttcagggctgcaatgagccataatcacaccaccgcactccagccgggatgacagagcaagaccctgtctctaatgataagaataaatgagattttaaaatcaatttaaaaaagcagttgcatccctactctcgagtcccttcctgtctgactacttttgcctgcattgataaaaagggtaatttttagacagtacctatggtttccacattcccacaaaggcaaaggaaataagaatctcatgatagcatcctgcctttcctgaacatacatcaggggcttttatataaacctgatgagatatcctacttctaaggaactggaagaaaatgccagatgtgaaattaaacattcattcccacaagtccgctttgaactccaacaggagcttagagccagtctgtacgtggcaccgcaggatagcaaagcttgttctgctggaaacaaaatatgtttctaaaaccccgcgagccggcggggcacggtggctcacaccagtaatcccagcactttgggaggccgaggtgggtggatcatttgaggtcaggggttcaagaccagcctggccaacatggtgaaaccctgtctctactaaaaatacaaaaattagctgggcgtggtggtgtacgcctgtaatcccagctactcgggaggctgaggcaggagaattgcttgaacccaggaggcagaggttgcagtgagccgagatcgtgccactacactccagcctgggcaacagagtgcgactccatctcaaaataatagtaataataataataatccttcaagccagctggacaaggtggctcacaccagtaatcccagccctttgagaggctgaggcaggtgggtggcttgaggtcaggagtttgagacccacctgggcaacatggggaaaccccatctctactaaaatgcaaaaattagctgggcgtggtggcacatgcctgtagtcccagctactcaggaggctgaggcaggagaattgcttaaaccctggaggcggaggttgcagtgagctgagatcgtgacactgcattccagcctgggcaacggagtaagactgctcaaaataataataataataggcaacatggccaggcgcagtggctcacgcctgtaatcccagcactttgggaggccgaggtgggggatcacgaggtcaggagatcgagaccacggtgaaaccccgtctctactaaaaatacaaaaaattagccgggggcagtggcgggcgcctgtagtccctgctactcaggaggctgaggcaggagaatggcatgaacccggaaggcgaagcttgcagtaagctgagatcacgccactgcactccagcctgggcgacagagtgagactccgcctcaaaaaaagtaataataataataataataataggcaacatggtgagaccccatctctactaaaatacaaaaattagctagtcgtggtagcacacgcctgtagtgccagctactcaggaggctgaggtgggaggaccacttgagcccaggaggtcgaggctgcagtgagctgtgattgcgccactgcactccagcctgagcaacagtgcaagaccctttctcaaaaaaatgtaaatgaataaatgaaataaataaaatcccgagagccactgctgcctctccctgccaccagtgttggcagagggcagggattcccctccctgaaacatgggccaggggtttttggacatctcatgaactttccaaaaggtatcaacccagcggtttccacgcagatgaaaatacaacaaaaagggcatttgcattcaaaggattctaaacggaaaatgacaaacccacagttttgtttggtttggtttggtttttttagatggggtcttgctctgttgccctggctggaatgcagtggtgcagtctcggctcactgcaacctctgcctcccgggttccagcaattctcccgcctcagcctcctgagtagctgggactacaggcatgagccaccgtgctcggctaatttttgtatttttagtagagacggggtttcaccattttggccaggctggtctcgaactcaccacctcaggtgatccacctgcctcggcctcccaaagtgctgggattacgggtatgagccacagattcaccagttttaaaccacttgcagccgattcttgttattggtggtagtttggctctgtgaaattcccctgaatgttgaactagtgaatactgaaccattgttcctaggaaaatgcgagggtaagtacctgcgaacttctggccacaacacatttatccatggatcaatacctagccttgttttatgtgtgtttctgttgaaagacactattgaatctatattgttgattcattaacaccgaactcacggccaacagtaatagaactcatgcctgaacaaagtttatgtaacacatgcctttgtgtgtgtgtgttggttttggagtttttttgtttttttgggttttttttgagacagggtctcactctgttgcccaggctggagtgcagtggcaccgccttggctcactgcaaccttcacctcctaggctcgagcaattcttgtgccttagcctcccaggtagctgagattacaggtgtgcgccatcacgcccagctaatttttgtatttttagtagagatggggtttcaccatgttgcccaggctggtctcaaactctggcctcaagtgatccacctgcctcaacctcccaaagtgctgggattgcagatgtgagccaccgtgccccgccacgctgccttttctccacaagggtggtgacagccctccttagccaaggaagagtagagagcagggcttcagcaccctggggggcatttgaaacagccccatcaccaactgaaagcacaaaaatgctaaaaatgtggcaccaaataaccacaaaaaggactcaggtttttttgttgttgttttttgttttgagtctcaccctgtcacccaggctggagtgcagaggcacaatctcggctcactgcaacctccacctcctgggtccaagtgattctcctgcctcagcctccggagtagctcggactacaggcgcccgccaccacacctggctaattttttgtatttttagtagagacagggtttcaccatgttagccaggatggtctcgatctcctgacctcgtgatccactcgcctcggactcccaaagcgctgggcatgagccactgcgcctgctcaaaaaggactagttttaatcctcagtgtgcagattgtatgaatctgacgcataagggctgaagcaagaaggtggaatgccctcttacttgacctcacatttgagactcgtacttatgagtgtcctaaaatgaccagaaaggcactgagcatgctggtttgagggttacaaatacatttgagtgagtaggtgaattcaaaaatacagggtctggggccaggtgcagtggctcatgcctgtaatcccagtactttaggaagtcaagatgggaggatcacttgaggccaggagttcgagaccagcctgggcaacatagcgagcccttatccctgctgaaaagttaaaaattaggccgggcacagtggctcgcgcctgtaatcccagcactttgggaggctgaagtgggcggatcacttgaagccaggagtttgagaccagcctgaccaacatggtaaaaccccatctctactaaaaataaaaaaaactagccgggcatggtggcgtgcctgtaaccccagctactagaaaggctgaggcaggagagttgcttgagcccaggaagcagaggttgcagtgaacccagatcacaccactgcagtctggcctgggcaacagagttagtgagactccgtctcaaaaataaataaataaataaataacaataaaaactagctgagcatggtggtgtgtgcctgtagtcccagctactcaggaggctgaggcaggaggatcgttgatgctcaagagttggaggctgcagggaattaggaccacaccactgcactccagcctgggtatcagagcaagaacctgcctctcaaaataaaaatttaaattttaaattttaaaaagaaaatatgggatctgggaatgatgaggatcaaccagactcaaatttaaaatttcaactttaggaatattaatccaattataagataaaatcttttaaagtctagagaaaactatagggatggagaacagatctgtggttaggggtggaggtggtttagtgataaaggggtgaattgagggagtttggacaacaacgagactgttctctatcctaattgtggcaatagccatacaactctacacatggcttaaaaatcataaaatggtacacctttaaaaagccaattttactgtatgataatgtttaaaatattttgttgttgttgttgttacacagtctcactatgtcacccaggctggatgcagtggtgcaatcacagctcactggcgcctcgacttcccaggctcaggtgatcctcccacctcagcctccctagtagctgggaccacaggtgctcaccactgtatctggataatttttttgtagggttttgtagagacggggtcttgctatgttacccaggctggtcttgaactcctgggctcaagagatccacctgcttcggcctcccaaagtgctgggattacaggagtggccccatgacacctagcctaaaaaattactaaacatcaaaaagatacataaaccaatggcacagttacctccctggacatgaatggaatgcttttggggacagggggacaagatttttttttattatttcttttctttttgagacagggtcgggctctatcacccaggttggagtgcagtggcatgaatatggcttactgtagcctcaaccttctgggctcaagcgatcctcccacctcagcctcctgagtagctgggactaccggtacacaccaccatgctcagctaatttttaaactttttctagagataatgtctcattatgttgcccaggctggtctcaaactgctggcttcaagtgttcctcccacctcagcttcctaaaaagtccagggattacaggtgtgagccactgcaccccaccacaagattttgcagaaggacttctgtgttttttttttcctttctacacttttgtaatttttctttttgcaatgagaatgcattacccgtcactatttaattaaaaactgtaaataccatgcagctgcaaaatatcaaccaggccaccccaagaagtattctttttttgtttgagacagagagaggatctcactgttgcccaggctggagtgcagtggtacaatcacagctcactgcagccttgcccttccagcctcaagaggtcctcccatctcagcctcccaagtagctgggactacagacacatgccaccatgcccagctaatttttgttttattgttagtggagacagggtcttgctgtgttgtccaggctgatctgaaactcctggacacatgtaatcctcccacctcagcctcccagagtgctgggattgcaggcatgagccactgcacctggccaaaaatattcttttttttttttttttttgagatggagtttcgctctgtcacccaggctagagtgcagtggcgcaatctcggctcactgcaacctccacctcccaggttcaagcgattctcctgcctcagcctcccaactagctgggattacaggcatgcgccaccacgcctggctaattttgtattttttcagtaaagatggggtttcaccatgttggtcaggctggtctcgaactcctgacctcaagtgatccacccacctcggcctcccaaagtgcttgggattacaggcgtgagccaccacacctggcccagaagtattcttaacagaaattaacacaagagaggcctgagagaaaaaaaaaaaatctcattatatacaccagttatattttgggttctagatacagggttgagagcatgaaatcctcattcaatgccaatatagctgtttaaataaatacacatggctaagtaggcaacatcacggtgatttttctcatccttggaatccgtatattcagtgcagcaaatgacacacgtttctttaacatctcttgcggtgtaaagagaaagacatagcgtttcatttcactcacttcattcgagttgtaccagggactgcacaagctattaggcatgctatcatgaatgaaacctcaaggcgtctgttccagatcagaggtcagcaaacgctgttctgtaaagggccaaagtgtaaatattttggccatggaattcctgttttaactactcaacctgccgtgtcggggcatttttgcgcagtcatagatgatgagtagacaaatgagtgtggttgcatgccaataaaactgcatttacaaaaaccgtgggatttggcctgagggccatagtttgctgacccctgttcagatgaagaagtcggaatctatgtaaatttcttagctgggcgcaatggttcctcatgcctataatcccagcacttgggaggcccaggagggaagactgcttgaactaggagttcaagaccagcctaggcaacatagcaagaccctgtttctacaaaaaaaaaaaaaaagttttaattagccaggcatggtggtgactgtctgtgagcccaggtacccaggaggcggaggcaagcaggttgcttgaggccaggaattcaagaccagcatgggcaacatagctagactctgtctctacaaataaattttaaaaattagctagtcatggtggtgcctgcctgtgatcctagtttctcagaaggccaaggcaggaggctcacttgaggccaggaaatcaagaccagcctgggcaacatagtgagactctgtctctacaaacaaatttttcaattagctgggcatggtggcacctgcctgtgattccagctacttggggaacctaggtgggaggactgctccaggccatgacttggaggctgcagtaagctaggactaaacctctgcactccagcctgggtgacagagcaaaatcctgtctctaaaaagaaataaaaattggaaaaaaaaaaaaaaaaaaaaagggccggacacggtggctcatgcccgtaatcccagcactctgggaggctgaggtaggtggatctcttgaggtcaggagtttgggaccagcctggccaatggggtgaaactctgtctctactaaaagtacaaaaactagccaggcggggtggcacatgcctgtaattccagctactggagaggctgaggcaggaccattgcttgaacccaggagacggaggttgtagtgagccaagatcatgccattgcacaccagcccgggtgaagaagtgaaaaaaaaaaaaaaaaaaaagtgagctgagagaagattaaaggaaacactgaccctctgggaagagagagccaacatcttagcccaggtagaaggagaagagaacagtaaaacagaagaacttaggcacaggtgagacgggagacacagccttccaggaggggggactggcaatgtcaaacccagaggggtcaagtgaggtgaggctgcaggagacgcaactgggagatgagagattaacttcgagagccatcggtaaagcagcggagatgcaagccagatgctgggggcagaacagtgagaaaagagtgagatggaaagggcagggaggactggcctggggaagctggacagggtggaggctggaggtcagtggtaggtaatggggattggggggtactgggtgtttagaggctgaaaaagcacgtgggtaaatgaagattcttttttcttttcttttttttttttttttttgagacagagtctctctctgttgcccaggctagaatgcaatggtgtgatctcggctcactgcaagctctgcctcccaggttcaagcgattctcctgcctcagcctcccaagtagctaggattacaaggacccgccaccacacctggctaatttttgcatttttagtagagatggggtttcaccatgttggccagggtggtctcaaactcctgacctcaggggatccgcccacctcagcctcccaaggtgttgggattacaggcgtgagccactgcacccggccgaggattattgaacaaagagaggagaaagagcaagagcccagatgggtaaatgtctcagacagggaaaaggttaactcctgcagagacgtgcctggcaatgtctggagacattagtggttgtcatgcctggggggaaggggatcctcccaggaccacatgggtggagaccatggttccagctcaacactctacatacaggacagcccccaccaccaggaatgatccagccccaaatgtcagcagtgccaagattgagagttctgcttaaaccaaagaggaatggaagtcaagggtagagtggggtgaggtggggagccctggggactcagcccacaccctgtggtctctatgcatgaatggggaagggcaagaagcaggtctccaggagagaagcaaagaataagaataactgcagaggccagacaccgtggctcatgcctgtgatcccagcacttcgggaggccaaggcaggcagatcgcttgaggccaggagtttgagaccagcctggacaaaatagcaagacttcagctctacacattaaagtaaaaattagccaggcagggtggcgtgtgcctgtggtcccagctactacggaggctaaaataggaggatggcttgcgtccaggaggtcgaggctgcagtgagccatcattgcccaactgcactccagcctaagcaacagagcaagacctcatctcaaaaaataatagatagctagagagatagatacaaaaatcacactgattttcctccacccttcatcccaatcaaaatgccatattgggcccggagtgatggctcacacctataatcccaggtctttggaaggccgaggcaggcagatcacttgaggtcagaagtttgagaccagcctaaccaatatggcgaaatcccatctctactaaaaatacaaaaattagccaagggtggtgatacacgactgtaatcccagctactcaggaggctgaggcaggagatgcacttgaacctgaaaggcggaggtcgcaaagatcgtgtcactgcactccagcccgggtgacagagtgacaccctgtctcaaaaaaaaaaaagaaaaaaaaaaaggccaggtacggtggctcactcctgtaatcccaacactttgggaggccgaggcgggtggatcacaagatcaggaggtcgagaccatcctggctaacacagcaaagccctgtctctactaaaaatacaaaaaataagccggtgttgtggaacacgcctgtaatcccagctactggggaggctgaggcaggagaatcccttgaacctgggaggtggaggttgcagtgagctgagatcgtgccactgcactccagcctgggtgacagagcaagactccgtctcaaaaaaaaaaaagccatattggttgacattagagattaatgatctgaaaagttctttgcccctccccaagccttcaagaggcatcacagcccatttatttgacaggattttgttcaccatcaccccaatcgtggggggtacggaggctcggactcaaaagaacaaagatttgttaagaaaccattgctctgcagccacactagctagattgcaatcccagccctgctgcctgctggcctcaagcgaagttttctcacttgtgaaaagggaagattaaaccgcacctcgtggggttttgccgtgaggattaactgagattatatatgcaaagcgcatagaacagcacctgctgagagcttgctcttctaattcttaggaaggtattatgcagagaataaggaactccttaagatgataaaggagcccagtacacccaggaactccaccacttgtgccccactgcagaacaaatatttactgaacacctactatgtgccaggcatcgttctgggctctagaaatgcaacggtgaacaacaacaaaccataaacccctgcccatatggaagccataaatgtgcaaagaaatggtaaatccatttactgaccctgaaagcccaggcacagatccacaattaattaccaaagctacaaggaacagaagaacagggaaccacacacacgcacacatagaatctggcatagttcgaaaccactcatcttggattttctttttatttatttatttatttttgagacagagtctcgctctgtcgcccagtggcacgatcttggctcactgcaagctccgcctcccgggtttacgccattctcctgcctcagcctccggaatagctgggactacaggcgcccgccaccacgcccggctaattttttctatttttcagtagagacagggttttaccgtgttagccaggatggtcgtgatctcctgaactggtgatccacccgcctcggcctcccaaagtgctgggattacaagcgtgagccaccacgccccgcctttttttttatttttttgagacaaagtctcgctctttggccaggctggagtgcagtggtgccatctgagctcacagcaacctcctcctcccgggttcaagcaattgtcccgcctcagcctcccaagtagctgggactacaggcgaacgccaccaaacccaggtaatttttgtattttgagcagagaagggagtttcaccatgttggccaggatggtctccatctcctgacctcgtgatccgcccgcctcagcctcccaaaatgctgagattacaggcttgagccaccgcagctggccagattttcttaacaagaactccaactaaccgccacccttcattgagcacctactgtctcccaggcacctgggggcggggctgggggggggtgggcccggggcttttagacattatgtgattgacagagtcgactcagcaaacccggttggtccactctagcacctgattttacatgcacccgtttccccatcaatacatttaagagcttcaattccttccctccctgaccccttcctcatcacgactgatttccttttatggagaaatctgaaacagtaacccaacagatatttttaaagcagggcctcagaccccacagtgggaaacccaggctatattccttaaatgattgcgccatcttcatcttacaaccccaaaggtgcctattgtcaagcccaaggaagatgctgcccacacgtgggagaggggcccatggggtcagggggaacgaaaggctcactcaaggtcaaaggctccttcatgaagcgcagggctgaggggagaggaggggtcaaggagacagcagacaagggacagtagtccagattcttgggcagaacgggacacacagaggctcaagtcctggctctggcactgactttagggcaagggagttatgcgtcctacatgagcctcagtttactcctctgtgaaatgggtgcataactgtatctgcctccgggggccactgtgacagtccagagagataagatagactaggctgtggcgtgcggtgataccaattacaataaatagggtaaaaaaccgccactacttctgctacaattgctgctgttgctaaggctttagaatttgcctccggacatctggaaacagaacccaaaagggtaaacatggacctagagtccggggtggccacgggcctagatccaaggtagttgggtagaggggggctctgcagtccctgaccccaggcagcgtcacccaccggtgaggcactcagggcgcttggctctacctacaccatatgcgctcgggggacttggctgttcggggctgtccagacccagtgaccccacttcccggccgcgacccaaagatgacgcgtgtcgtgtctccggagcgacttgggctcggaggggccggggcacgggtcggaggcgcgctccagagaggagcccgcggcggggcgggcaccggggcaaggttcctcgggctcaggtcgggcacgcagggcgcggaggcgcgagcccgggcgggcaaaggccaaggtcagaggcttcccgctccccctacgcgatgcaggagctaccgtcctggccaccgccccccgcccctggggagggttctcagtccacaagcgggggctcgattttggcttgggtggggtcctctccccatcgcggcgctccccgcccacgcccgcgcccccagactcaccctctccggggtacaggtggcccgcggcgcccagtagcagcgcggccaccgccaccagcagcggcgcggccgccgccccccgccggcccccggtggccatggctgcgggagcgcggggtctcctcggatcagagcgcgcggcgctggcccgcgggggtcatgctccgaggcggccacccaagaggcgctgggggccgcgcgtccttctcttccacgcccgcgacccgcgggccgcagcccccctgccggggagggcccagaggcagccccgggaagggcgcgcgcggcttcgccagctacaaatactgagcggaggcccttgcggtggtggccccgaccccccggccgctgcggcccgggccccgtcccaggatctcggggcccggagctccgcgctgcgcccgggactgtctctcggctctcggccccgcgcgctctgggtcgcgatctgcgggctccgggacagagggacgcgcggaccgacggactagctgactggcgggcgggcacctgggctggcgggtggcgggcgggcggcgggagagagggctgctcgggcccgtaaacaacgcggcccgtcagctgggccccgtgcgggccgcgggaaaaggcggcgcggatctggcctaggaagggactctgcgcccgggagaggcccaggagagggagggaaagcttgcaggggagggaggtgccgcccggccccgccccgccccgcccgcctccccgcctccctgtgccgggccccgcgcgggaggccctgggcgcgccgggaccgagggcgcgccccagatccgcgcgccctacagccccgagtctcctccagtttcagacccccggaggcgccccacaggcccgacgcagcggcacagatcctttctctaccattttgctattttgttcatagtgggctttggaggattcctgttgattttttaaaaaatactgcattaaaatgtttattttggtgactcgaggtggttttggtttctttctttttttttttttttcactcccttaaattttgcaccccaggcgagtagtgtctcactcgcctttcctcagtccgggcctggccagcgacactcgtcccagagcgcgtgggcgcccccagatgtcccgcccgcgagtgcgccccggcccaggggcgagacccaagccaggcccctggggacagccacgtgcccgcgtgcccagtgcgctccctgtgttcaagttggagaaatgacacctggaaaaatgtgcagacgcttctgaaagggcaaagacgacgccaaagaagacgccggagacctcgaatagggcgcaggtggacatctctgattttcagcagaccagcctgtatgtgtctgaagtctagcaacgacattcaccaacaaggcgggacagcggttccacctaccttactgcaggagaggaaggggctttcagtataggaaagccagaactcaatgggaggagggttcctccacccctcactcctgtgtggtcttggaccagggacttttctgtctctgggccagtttcacttgtgtaatgggtttaataatacctgcatgccagttctggggaggtacccgggaaagaaaacttaagaaagcgcccagcacaaccctagacccaaggcattcattcttctttcattcaataaacagtttgctaggagctggacccactgttcatgcaacaggccaaacctattcctgcctctgggcctttgccccagcatttcccttgcccgtaacactccaggatggcttcatctctgaagtgccatccctaaccatatttttgcaaatcctccccccagttccgtttccttctctctctctctctctctgtttttttttttttttttttttttttttttttttttttttttttagatggagtttttctctgttgcccaggctggagtgcaatggccagatctcagttcactgcaacatcacctgcctgggttcaagtgattctcctgcctcaacctcccaagtaacttggattacaggcatgcgccagcacacccagctaattttctgtatttttagtagagacaggatttcaccatgttggcctggccggtctcaaactcctgacctcaggtgatccaccggccttggcctcccaaagtgctgggattacaggcctgagccactgcgcctggccccttctctctcattttcatagcatgtttaccccactacctgcaattgtttgttttttttttttcttttctttctttttttttccttttgacagaatcttgctgtcacccaggcaggaatgcagtggtgcaatcctagcttactgcagccttgaactcctggcctcaagcaatcctcctgccttggcctcccaaggtgctaggattacaggcatgcgccaccatgattggccttgaaattcttattcgttttctgtgtcttctccccttcccgtgaaggcggaaatcttttcggtcttgtttcactgcttaaacccagtgcctgacaaatctgttgcttaataaatatttgttgagtgggagaatcaacaagcaataagtaataggggatttttcagtgagcaaaataaacatgacccatttccttatggagttcacaactgagccagggagagagcccttaaaataattgagtgtgtaatgagctgagggaaatgggaggtgcatagggaggggtttgctgaggacatggggttttttgtttgtttgttttttgatggatcttactctgttgcccaggctggagtgcagtggcacgatcttggctcactgcaacctccgcctcccaggttcaagcaattctcctgcctcagcctccagagtagctgggattacaggtgcatgccaccacgcctgcctaatttttgtatttttagtagaggcagggtttcaccatattggacaggctggtcttgaactcctgacctcaagagatctgcctgtctcggtctccctaattgctgggattacagacgcgtgagccactgcacctgactgaggatgtgattttgagcttaagtctgaaaatgaagaggagccatcctagggaagccatagggatgtgtttcaggtgggggaaggcatgagcaaaggcccagaggagagtgggcaaggcattcttgcaactgaaccaggcattcactgtagctgcagaaaagaaagaggagaaagtgaagccatgggtgagaactgcagtgggcccttgaacatgagtttgaaccgtgcacatcttttttttttttttttttgaggcagagtctcgctctgtcaccctggctggagtgcagtggagcaatctcagctcactgcaatctccacctccagggttcaagctattctcctgcctcagcttcccaagtatctgggactacaggcacacgccacctcacccggttaatttttgtatttttagtacagacgggattttaccatgttggccaggctggtatcgaactcctgacctcagctgatctgatcagcctcccaaagtgaggtcatctttaaacagaatgtttttcaataaatatattggaaacatttttagagatttgcaatagtttgaaaagacttgcagatgaacttggtagccaagaaatattaaaaaaaaattaggtatgtcatgaatgcataaaatatatgtagatactagtctgttttattatttttgttattattttcttttagagacagggtcttgctctgttgcccaggctggagagcagtggcccaatcatggctcactgtaacctccaactcctgggttcaagcgatcttcctggcaagcaccaacacgcccggctaatttttttactttttatagagacgaggtctcaccatgttgcccaggctggtctctaactcctgaactcaagtgatcctcctgcctctacctcccacagtgccgagattacaggtataagccaccatgtccagccctattttataatttgctaacataaaatatacacaaatctgttacaaaaagttaaaatgtattaaaacgtacacacacacttacaaaccatacatggtgttattccaagtcaagagaaatgtaaataaatgtaaagatgcagcattcaatcataactgcataaaattaactatagaatatattgtgttattgtaacaatttcatagccacctcctgttgctactggagtgagtgcaagtgttgcaagtatccgctttaaatgccatgttacattaattatctccctgtgggcagttcacctctccaggaatttgtgccccggtaaaaagggatctcttggcggttcccgcgtatttttcactgtgtttagtgcaataccgcaaacattgaataacatcctgagacccatgtaaagtgccactagtgatgctggaaatgctcccgagaagcagagaaaagtcaggacaggacaagaaaaagttgaattgcttgctacgtaacataaatggagctctacagctgcggttgtctgcttcagacagacaattcatcttgtaaacaaatttatggcattgataaatattgtagcgttctgtaactgtaaatgtattttctcttccttgtgattttctttttctttttctttttttcttctttttggagacagggtttcactctgctgcccagactggagtgcagtggcaccatcagggctcactgcagcctctacctcctgatctcgggtgatcctcctgcctcagcctcccagggagctgggattacagccacatgacaccatgcccagctgtgattttttaaataacattttctcttctctaacttgctttattctaagactgtagtgtgtagaggctgggcacagtggttcactcctgtaatcccagcactttgcaagacagagggaggcggatcacttgaggtcaggagttcgagaccagcctggccaacattacaaaaccccatatttactaaaaatacaaaaattagccaggcgtggtgtgcttgtaattccagctactctggagggctgaggcatgagaattacttgaacctaacaggcggaggttgcagtgagccaagatcatgccactagcgcactccagcctaggtgatgcagtaagactctatctcaaaataataataataataaagtaagaaagaaagaaatacagtatgtaatacttgtaacatacaaaatgcctgttaatcggctgtttatgttattgctaagtcttcaggtcaacagcaggctataagtagttaagttttcagggagtcaaaagttatattcagattttcaactctgtaggggtgaattggcaccagtagccacaacactattgaaaggtcaactataaaaagtgcagaacctagaatatgccatgttaagatttgctttggggctgggtatggtggttcatgcttgtaatcataatcccagcactttgggatgccaaggtgggtgcatcacttgagcccaggagttcgagaccagcctgggcaacaaggcaaaaccctgtctctaccaaaaatacaaaaaaaatagccaggcatggtggtgggtgcctatagtcccagatactcaggaggctgaggtaggaggatcgcttgagcccaggaggcagaggctgcagtgagctgagatcgccccactgcactccagcctaagcaacagagggagactccatctcaaaaaaaaaaaaaaagatttgcatctccatgatactaaaaatgcatttggtaaacttcacagccattcagatatgaaaccataagactttatgatatgaaaattttattttataatttcagactgaggaaagtttctccaagccagacgtgaatcccaagtttaactttgtaaaataacaaacttggctatgtagaaattaagattataagaatagccaaaaaaaaagtctcatatatcaagtcaaaagacagatttttaaagaaatttttcttggccaggtatagtggctcacgcctgtaatcccggcactttgggaggccaaggcaggcggatcacttgaggtcaggagtttcagaccagcctgaccaacatggtgaagccccgtctctactaaatacaaagaattagctgggcgtggtgatgcatgcctgtaatcccagctacttgagaggctgaggcaggaggctcgctttaacccgggaggcagaggttgcagtgagccgagatcgcgccattgcactccagcctgagcaacaagagcaaaactccatctcaaaagagaaaagaaaaaaaaaagaaaaatttttctgttgatgcataacagacgtacatagttttggggtacatgtgataatttaatacattcatataatttgtaaagatcaaatcagtgcacttgggatatccctcaccttaaatatttgtcttttctttatgttagaaacagtcaaattcttctagctattttgaaatattcaataggctattgtaaactatagtcaccctactgatctaacaaacactgtcttatttcttctatcaaattgtacatttgtacctagcaatcagcttctcttcatctccctctttctcctaccctttctggtaaaccaacaatctactgtctatcttttttttttttttttgagacggagtctcgctctgttgcccaggctggagtgcagtggcacgatcccggctcactgcaaactccacctcctgggttcacgccattctcctgcctcagcctcccgagtagctgggactacaggcgcccgccaccgagtccggctaattttttgtatttttagtagagacgggctttcaccgtggtctcaatctcttgaccttaggtgatctacctgccttggcctcccaaagtgctgggattacagttgtgagccaccgcgcccagctactgtctatctttatgagatccactttttttttgtttttgtttttgagacaaaatctcgctctgtcacccaggctgcagcgcagtggtgcgatcttggttcactgcaaccttcacctcctggattcaagcaattctcctgcctcagcctcccgagtagctgggactacaggtgctcaccaccacatccggttaaatttttgtatttttagtagagatggggttttaccatgttggccaggctggtctcgaattcctgacctcaagtgatccatccacctcggcctcccaaagtgcagggattacaggcatgagccactgcgcccgtccgagatccacttttttagctcccacataggagggagaacacgggatatttgtccaaaagacagacgttttaagtgaggaaagtatatgcaacagataaaaggcatgcattcagtctgggcaacatagcgagaccttgtctctacaaagaatgtgaaaattagctaagtgtggtgatgtgcacggatcatcccagctacatgggaggctgaagggggaggattgctggagcccaggaattcgaggctgcagtgagctatgattgcaccactgcactccagcctggacaacagagcaagaccctgtctctaggaaaaaaaaaaaaaaaaaaagcttaagggtcagaaatgagattttttttttatttgtacaaatttaagtggtacaagtgcaattttgttacatggatatattgcatcgtggggaagcctatgcctctggtgtatccattacccaaataacatacattgtgccccagaaatttaaaatgaaagactaagagagctttttgggagaattgaaatatacctccttgttttggtttattatagtaaaatacacataacacagaatttatgattttaaccattttaaagtgtacgactcaggaatattcagtactttcacgacgctgtgcaaccgttgtcaccatctcattgcaaaatgttttcatcaccccaaacagaaaccctgtccccatgggcactcactccccacctcccctccccagccccaggcatccactaatccacttcctatctctgtggacttgcctgttctgcaaactccatataaatggagcaatataatatgcgagctttggggactagctacttttatttggcataatgtgttcaaagttcatccttgtcattgcctgaaccagtgctttattcctttttatggctgaaggatattccatcattccttagagtttgaatgatcagacccattccacactcctattttgaactcatgcttatttatttatttatatatgtatttattgagacagggtctcactcttgttgctcaggctagagtgcagtggtgctatctcggctcactgcagccttcaactctctggttcaagcgattctcctgcctcagcctcccaagtagctgggattacagaagtgtgctaccatgccccgctaatttttgtattttttggtagagacagggttttgtcatgttggccaggctggtctccaactcctgacctcaagtgatcctcccgccttggcctcccaaaagtgctgtgattacaggcgtgagccactgtgcccaaataaacccatgctttttgaagcctgcaatgtgaaagtgcaaaccacgatagtcaataataattttattgtactttttaattaattaattaattttttttgagacagagtctcactctgtagcccaggctggagtgcagtggtgccacctcggctcactgcaacctccgcctcccaggttcaagcgattctcctgcctcatcctcctgagtagctgggattacaggtgcccaccaccacacccggctaatttttgtatttttgtatttttagtagagatggggtttcaccatgttggccaggctggtctccaactcctgacctcaagtgatctgccgggctcagcctccgaaagtgttgggattacaggcgtgagccagcacgcccggcttaattgcacatttaaaaataactaaaagagtataactggattgtttgtcacacaaaggataaatgcttgaggggatggagaccccattctccatgaagtgatgattacacattgcatgcctgtgtcaaaacatctcgtgtactctgtaaatataatcaaccactatgtacccacaaaaattaaaaacacaaatttaaaaataaaagaagtgcaacccacaggaatttctgggcgatgagcttcctccagtgtcttatgctgctagggccatgatcagaattgaggcttcatgttagagtctcagcacagatattacctgggctcaacatagaaaactcttagaaaatgattgggagagtcaggcgcggtggctcacgcctgtaatcccagcactttgggaggccgaggagggtggaccacctgaggtcaggagttcaagaccagcctgggcaagatggtgaaaccccatctctactaaaaatacaaaaattagctgggtgtggtggcatgagcctgtaatacaagctattcaggaggctgaggcaggagagtcgcttgagcccaggaggcagacgttgcagtgagccaagattgtgccattgcactccagcctgggctatagagcgagactccatctgaaaataaataaataaataaaatgattgagaggccaaggggggtggatcacttgagttcaggagttcaagaccagcctgggcaacatggtgaaaccctgcctctacaaaaagtaccaaaattgccactgcactccagcctgaatgacaaagtgagaccctgtctcaaaaaagagagagaaaggaagagagagagagagagaaagaaagagagaaagagagaagagagagagaaagagatagaaaaaaggaaatcaaaggaaggggagggggagggggaggggagggggagggagggggaaggggagaggggaggggaggggaggagagggaggaagggaagaagagaagggaagggcagggcttctatgtcaaactatttgtgcctcaatcaggcaaagaatataaaggaagtattaccaatttatctggagatactggcgcaatgatctttgcttctctctcttcccatttccctctcctcggtgcacttttcaagaaagacgaagacaaaatttatgtaaaatattctcatttctcaaaagcacttcttggatttgtttcgcaaatgtacaagaccctttcccactggctgagagaggtagttacccgaatctaggtagaaaatgattatataaaattttataagtaaaattatttttgcaacataaacactgaaaagatattcagcgaaacaatgtcatgtttcaagaaaagaccaagctacatctacatgtcctgagatgagaacttcctatatatataactacctaaaaagaatcaaatgcagaaccatgtacctgaaacactatcatttgcattttaaaggggggtgaggtacagccacgcacactcacctatacgcattcacagatatttccagaatcttgaagtacgtctccaaaaacacattcaaaactggcaatctttttttgtctgtttgaagagttttaaccatgtatattaattccctttttaaaacacagcatgagacagttaattttttttttttttttcagaacagcatcaccatagctacaaaatgacataaaataaaatacaaagagagccgggcgtggtatgccccgcctgtagtcctggctactccggaggctgaggcggaaggaacgcttgagcccgggagttcaaggatatagagaaacatgttcccgcctctgagtaccactgtattccagcgtggttgacatagggagaccccacctcctaagaaaaaaaaaaaaaaaaaaaacttagaaaaacaattaacagcaatggctctgacctaaattttttaaaaaactaatgctttataacttgaataaataaagaaatgtgccttattatttctgggaaaaagaacagaatattggaggccaggcacagtggctcatgcctataatcccagcgctttggggggcccaggcaagaggatcacataaggccaggagttcaagaccagcctgggcaacatagcaagaccctgtctctacaaaaaaaaaaaaaaaaaaaaaaattgtaaaaattagctgaatgtggtggtgcctgcctgtggtcccagctactccagaggctgaggtgggaggatcacttgagtctaggatttcaaggctgcagttagctatgattgattgtatcgttgcacttcagcctgggtgacagagccagatcttgtctcaaaaaaaaaaaaaaaaaacttcaaaattatacctaaaaggtatagaaaaattattctgaagttcatctggcatagggtttctcaacctcagggatatggacactgaggcatggataactcttcgttgtggaaggctgtactgcacattgtagaatgttgtgtgtgtgtgtgtgtgtgtgtgtgtccgagtctggctctgtcacccaggctggactatagtggcacaatctcagctcactgcaacctccacctcccaagttcaagtgattctcctgcctcagtctcccgagaagctgggattacaggtgcccaccaccgtgtccggctaattttgttgtgtttttagtagagacagagtttcaccatgttggccaggctggtctcgaactcctgacctcaagtgaccaggagcatggactcacatcccagttctgctgctagaccaagatgtttggccaagaccaagtagagtacctcaaccactagctctttctccagaaaaactctcttgtggctgtgaactgcctccatcaacccaatcaccaatctcagaccctggatgtccaccacaagacccgctgcctactctgccctctgaacacctctctacctgcttccttcactttcagttctttcttatttatttatttatttttgagattaaatcttgctatgttgcccaggctggggtgcagtggcacgttctcggctcactgcaacctcctcctcccaggttcaagcatttctcctaactcagcctcccgagtagctgggactacaagcatgtgccaccacacccagctaatttttatatttttagtcgagatgaggttttaccatgttggccaggctggtcttgaactcctgacctcgttatctgcctgcctcggcctcccaaagtgctaggattgcaggtgtgagccactgcacacggccctccttttcagttttttaaagacagggtctcactctgtcacccaggctggagtacagtggcacaagctcagcccacagcaacctccgcctccgaggttcgaacgattctcctgcctcaccttcccaagtagctaggactacaggtgtgcaccaccacacccagctaatttttgtatttttaatagagacgagttttcaccatgttggccacactggtcttgaccacctgacctcaggtgatccacccacctcagcctcccgaagtgctaggattataggcgtgagccactgcacgcagccccatctgacttcttaagtcaccttgccttattacccatcagaggaagacatttctactcccttccctctctgagatgctctatttgcgttaaaacaatcgtaacagtccatgctttcattatgtgcagtagctcaaaactagaagcaacccagatttttatcaacaggtgaatggataaaccaacagtgatataaccatgccatggatcactgcttcacaataaaaaggaaggaactattgatacatccaacaatagggatgtatctcaaaataattctgctgacttagaagtcaggccataaaaaaatgcttggtacatgattccagaaaatcttagaaattctgctgacttagaagaagccaggccaaaaaaaaaaaaaaaaatgcatggtacatgattccatttccatgcctgtaatcccagcactttgggaggccaaggcgggtggatcacaaggtcaggagatcaagaccatcctggccaacatggtgaaaccccgtctttactaaaacttcaaaaattagctaggtgtagtggcaggcacctgtaatcccagctactcaggaggctgaggcagtagaatcgcttgaacctgggaggtagaggttgcagtgagccaagatcaagccactaaactccagcctgggtgacagagcgagactccatctcaaaaaaataaataaataaaactcatccataatgacagacagcaaatcacgagctgccaggagaggggaaagagggaggggttccaaagaagcatgtagaaactttcagctgggcacagtggctcacgcctgtaatcccagcactttgggaggcagaggtgggcagatcacttgaggtcaggagttcgagaccagcctggccaaaatggtgaaccccgtctgtactaaaaaaaaaaaaaaaaatagtggggcatggtcgtgggtgcctgtaatcccagctacttgggaggctgaggcaggaaaatcacttgaacccaggaggcagaggtcgtaatgagccgacatcacaccattgcactccagcctgggtgacagagtgagactccatcaaaaagaaaaagaaaaaaagaaagaaagaagaaaagagaagaaaagagaaaagatcaaactactctataatgacagacagcaaatcactaggtgccaggagagggaaagagggaggggttccaaaggagcatgtagaaactttcagctgggctcaatagctcatgcctgtaatcccagcactttgggaggcagaggtgagcagatcacttgaggccagcagttcgagaccagcctggccaaaatggtgaaaccccgtctctactaaaaatacaaaaaaaaaaaaaaaaaaaaaattggcggggcgtggtggtgggtgcctgtaattccagctactcaggaggctgaggcaagagaatcatttaaacccaggaggcagaggttgtaatgagccaagattacaccattgcactccagcctgggtgacagagcgagactctgtctcaaaaaaaaaaaaaagaaagaaagaaagaaaagaaactttcagaggtgatggatgtgttgctgtcctgatggtggtggtgttttcacaggtgtagacatacagcaaagtgtatcatattgtacaccttaaatatgagtggtttattgtatgtcaattacactttaataaagttgttttttaagcaataaaagttgcattttacaagtttcaactggcgatttttttgttagtttgtttgagacagggtctggttctgttgcccagcctggagtgcagtggtgcaatcatagctcacagcagccttgaccgcttgggttcaagcaatcctcccacctcagccttccgagtagctgggattgcaggtgctcgtcaccacacccggctaattattttatttcttgtagagacaaggttttgccatgttatgttgcccaggctggtcttgaactcctgggctcaataaatccatccacctcagcctcctaaagtgctggggttacaggtgtgagccactttccccggcctcctagactgacgatcttttgatggtgtttgctcttccccacactctgaagtttaaggacacaatcaatgagaccagtctctacagcagaacacgttggtgctacctgctattctgttgtggagttggtggttgggaatttcctattgagtagctctcattcaaggggttataattccgtaaaagctgcccccatcctatctgatgtaaaaaccttcagagttgaaaccatccatcactagttacaaagtagctcaacaagaatccaagaggcaggccggatgtgctggctcaggcctgtaatcccagcactttgggaggccaaggcaggcggatcaggaggtcaggagatcaagaccatcctggctaacacagtgaaaccccgtctctactgaaaatacaaaaaaagtagccaggcgtggtggcatgtgccttgggaggctgaggcaggagaatcgcttgaacccgggaggcagaggctgcagtgaaccgagatcgtgccactgcactccagcctgggtgacagagcgagactccatctcaaaaaaaaaaaaaaaatcgaagaggcagtaaacatcccgagcaaaggagaccacgacgaggtaagagattgtaactctgcaccagacatttcacaggactgaattaagcgtcacggatttgtggtgaaaagtgagcataacaaatttcatccagccaatgaacctctccagacaggaatgcaaccagcttttaaagggacagccgcaagcaatatgaaggtgtttccagctattaaggatgcacctggccagcattattctaagtgaagtaactcaggaatggaaaggcgaatatcctatgttctcattgataagtgggagctaagttaggaggatgcaaaggcataagagtgatataatggccaggcgcggtggctcatgcctataatcccaacactttgggaggccgaggtgggcggatcacgagatcatgagttcgagaccagcctggccaacatggtgaaaccccgtctctactaaaaatacaaaaattagccaggcgtggtgctgcacacctgtaatcccagccaccagagaggctgaagcaggagaatcgcttgaaaccagagggcggaggttgcagtgagccgagaccgcaccactgcactccagcctgggcaagaagagcaaaactctgtctttaaaaaaaaaaaaaaaaaaaaaagtgatataatggactttggggacttgggcagggaaaattggggggagaaggatagaagactacatattaggtacagtgtacactgcttgggtgacaggtgcaccaaaagctcagaaattgccactaaaaagcttatccatgtaaccaaaaaccacctgcaccctcaaaactactgaaataaaaataaaaatttaagaaataaataaatataccttcttcctaggaaaataaataaataatgcaccagccaggctcagtggctcacgcctataatcccgacactttgagaggctgaggcaggtggatcacctgaggtcaggtgttcaagaccagcctggccaatgtggtgaaaccccgtctctactaaaaatacagcagttagccaggcatggtggtgcacgcctgtaatcccagctagtccagaggctgaggcaggagaatcacttgaacctgggaggcagaggttgcagtgagctgagctcacgccattgcactccagcctgggtgacagagcgagactctgtctcaataataataatgataataataataataataataatgcacgtatccaggtgcagtgactcacacctgtaatccaccactttggaaagccaaggtgagagtatctctagaggccaggagttcaagacccacttgggcaacatagcaagaccccatctcttaaagatttcaaattggccagtcatgatggtatatccctatagtcccagcattttggaaggctgaggtaagaggatgacttgagcccaggaggtcgaggctgcagtgagcaatgatcataccactgcactccagcctgggtgacagagtgagaccctgtctctaaaaaaattaataaataaataaaataaggagtcagagagagttttgacagaagagaataaggtcatgtaaagatagttgcagagactggagtgatttagccacaaacaaaagaatgccaatagccaccagaagtgagaagaagcaagaaatgtgtgcgtgtctgtgtgtatgtgtgtgtgtgtgtgtgtgtgtattttctttttttgtttgagacagactttcactttagtcacccaggctggagtgcaatggcgtgacctcggctcactgcaacctccgcctcctgggttcaagcgattctcctgactcagcctcctgagtagctgggattacaggcgcacaccacaacacctggctacttttatttttgggagacgggatttcaccatgttggtcaggctagtctcgaactcctgacctcagatgatccatccaccttggcctctcaaagccatgaggcaccgcacccagctgtatgtgtgtattttttaattgatgtgaaattcccataaaataagatcgtggatcttaaagtgaataacttagtggtattttgtacatttacaatgttgtacaaccaccacctctatcaagttcctgaacattttcatcaccttcaaagggaaacctcacatatattaagtagctgttccccattccaccccctccgtgacaactagtaatttactttctgtctctgtgaatttccctatgccagatttttttttttttttttgagatggagtttcactcttattgcccaggctggagtgcaggggtatgatctcggttcactgcaacctccgcctctcgagttcaagtgattctcctgcctcagcctcccaactagcttggattacaggcatgtgccaccacgcctggctaagttttgtatttttagtagagacggggtttcatcatgttggccaggctggtctcgaactcctgacttcaagtgatctgcccgcctcggactccccgagtgctggcattacaggtgtgagccaccgcaactggccagagtttccttcctatttatttatttattttatttttgagatggagttttgcttttgttgcccaggctggagtacagtgacgtggtctcggctcactgcaacctccgcctcccgaattcaagtgattcttctgcctcagcctcccaagtagctgggattacaagtgcccgccaccatgcccagctaatttttgtattttgagtagagacagggtttcaccacattggccaggctggtctcgaactcctgacctcaagtgatccacctgcctcggccttccaagtgctgggattacaggcatgagccaccgcgcctggccgaatgtccttcctttttaaggctgaatcctatcccaccctacggagggaccacattgtttatccattcgtctcttgctgggcacttgggtgccttctgtctttggctgttatgaatcacactgctgtggacatgggtgtacaagtgtctctttgagtccctgctttcaaatctcgtgcgtgtatacccagaagcagaatttctaggtcatatggtaattctatgtttaatttctttttttttcttttattttttttgagactgtgtctcattctgtcgcccaggctggagtgcaatggcgtgatctcagctcactgcaacctccacctcccaggctcaagcgattctcgtgcctcagcctcctgagtggctaagattacaagggcccgccaccccacctagctaatttttttgtattttgagtagagacagggtttcaccacattgcccaggctggtcttgactcaggcaatcttccggcctcggcctcccaaagtgctgggattacagatgtgagccaccgtgcccggcctgattctatgtttaatttctttaaggaaccagtgtacccttttccatagcagcggcaccattttatattcccaccatcactgcaccggaatttcgattcttccccatccttgccttgtggcgtacacatcccgcaccccaacaccttcttggtgtctgcttccagagcaccccactgggtgaccgtcaagctccacagctgagtttctgaccactgtgcttcccagattccctcctgaatgctccatcttccgaatgcctttgggccacagatggcccgggaaggaggctttctgctagcataagtcactgtagtacagtgtacatagcagatatccaggtcctgggagcatcctttccctagttctttctttttttttttttttcctgagatggattccactcttgccacccaggctagagtgcagtggcgtgatctctgctcaccacaacctccgcctcctgggttcaagcgattctcccacctcagcctcccaagtaactgggattacaggcatgcgccaccatgcccagctaattttttttttagtatttttttttttagtagagacggagtttcttcaagttggtcaggctggtcttgaactcccgaccttaggtgatctgcccgccttggcttcccaaagtgctgggattacaggcatgagccaacgcgcccagccttctttccctaattcttggtcaaccatccccactcactttccacaacctgactcaagccctgccattcttctcagctcccaagacctcccacccctgcctgagacacaccagctggtggccttcctcgctcccaagaggaagagcagtcatgcggtccattacccgccttcccagtctttacccggaactccatccgcacccacctcatggccttccttcctccctgttcccggctgtgatcagcccttcccctctatcctgggcctgtccctttgcaacttccaggttggcatccaccagccattctgtctctcctgagcctctctgctccattcccctggctgtggactcagccttctcagatcccagctcttccacatcccggctgtgtgagaggcagatgcacctcttctgtaaaatgaggaataaaaaaagaaatatgggaccaggcacagtgccttatgcgttaagaggccaaggcgggaggattgcttgagcccaggagtttgaaaccagcctgggcaacatagtgaaagcccgtctctactaaaaatataaaaactagctggccatggtagcgggtgcctgtaatcccagctactcgggaggctgaggcaggagaatcgtttgaacccaggaggcggaggttgcagtgagctgagatcacaccactgcactccagcctggtgacagagcgagactccatctcaaaaaaaaaaaagaataagaataaataaaattagctgggcatggtggcacatgcctatagtcccagctactcaggaggctgaggcaggaggatcgcttgagcccaggggtttaaggatgcagtgagtcacgatcatgccactgcactgcagcctgggagacagagtgagaccccatctcaataacaacaacatacaaacaaaaatgatgcctccgtatccttgtcacaaacaattggtgctattttcttagtgcataattaacaaaattcacccatgcttccagttcaccagatcagtggtgcctgtaccatcccacacagaagaaaatcttatttattttctatcttgattttttttttttaagatggagtctcactctgtcacccaggctggagtgcagtggcatgatctcagctcactgcgacctctgcctcccgggttcaagcgattctccttccatagcctcccaagtatctggaaccaggcaagtgccaccacacctagctaatttttgtatttttattagagacagggtttcaccatgttggccaggctggtcttagaactcccgacctcaaataatctgctcacctcggcctcccaaagtgctaggattacaggcgtgagccaccacaacagacctatttttaaattgggtgtaatttacatgcaataagtttatgtaaactgtaagcagaaggtttgatgagccttgatagcatacacaccttttaaccatgacccctatcaagatatagaatatttctaaaaatagtactaccattccatccagcaatcccactactgggtatctacccaaaggaaaagaaatcaatatatcaaaaagatacttgcacccatatgtttattgcagcaccattcacaatagcaaagacatggaatcaacctaagtgtccatcaatggatgactgaataaagaaaatgtggtatacatacaccatagaatactgttcagccataaatagtatagtattctttgcaaaataatgagatcatgtcttttgcaggttcatggatggaactgtaggccattctctctctctctttctttcttttttttttttgagacggagtctggctctgtctcccaggctggagtgcagtggcacaatctcggttcactgcaacctccgcctccgggttcaagagattctcctgctcagcctcctgagtagctgggattacaggcacccgccaccacacctggctaaattttgtatttttagtagagacggggtttcaccatgttggtcagactggtctctaagtcctgacctcatgatctgcccacctcagcctccccgagtgctgggattacaggcgtgagccaccgcgcccggccctggaggccattctcttatgtgaaacaagccagacacagacagacaaatatcacatgttcttacttataagtgggagctaaacaatgtgtacacctggacgtagagactggggtgattgacaatagagactcaaaagggtggcgcaaggcggtgggtgatgagaaaatacataatgtatatgatgtacattatttggtaacggatatcctaaaagccctgactttaccactaggagcacaactatgcatatcacaaaatggcaaggctgaacgtggtgactcaggcctgtaatcccagcacttcaggaggccgaggcaggctgatggcttgagatcagaagttggagaccagcctgggcgagtccccatctctacaaaaactacaaaacttagccaggcgtggtggcacatggctgtgttccacctactcaggaggctgaggttgggaggatcgcttgaacccaggaggtggagattgcagggagacaagatggcaccactgcactccagcctgggtgatagagtgagatcctgtctcagaatcaaaaatagcacttgtaccccatacatttacatatattttaaaaaaacgctatatgtgtaaacttgttttttaaaaagatgtgaaatattggccaggcacagtggctcacgcctgtaatcctaccactttgggaggctgagagaggtggatcacctgaggtcaggagtttgataccagcctagccaacatggtgaaacccggtctctactaaaaatacaaaaaagctagccaggcagcagctgtaaactcaggaggctgaggcaggagaatcgcttgaacctgggaggtggaggttgcagagagccgagatcgctccactgcactccagcctgggcgacagagcaagactctgcttcaaaaataaataataaaaaaaaagatgcggagtatttccattaccccaaaaatcttcctcatgtctcttccctgtctgttggggtccccaacatccagaggtaactgtgattctccatcatgttaaactcctttgatctcttagaggactttatagaaatggaatcttgtggtctggtacgggttgagctccctttgctcaacataacgtcggtagcattcagcagtattgctgaggggacagagggtcatgttcacagcagcactattcacaatagccaagaggtaaaagcaacccaagtgtccatcaatagatgaataggtaaacacaatgtggtatatccatacagtggaaaattatttagccattaaaaggaaggaaatcccgacacatggtaaaacatggatgaaccttgaggacattatgctcaatgaaaagagcaattagccagtctcaacaaatcctgtcttttttttttttcatagactgagtctcactctgtcacccaggctggagtgcaatggcgccatctcggctcactgcaacctctgcctcccgggttcaagtgattctcctgcctcagcctcccgagtagctgggattacaggtgcatgccaccacgcccagctaatttttgtatttttagtagagacggggtttcaccatcttggccaggctggtctccaactcctgacctcgtgatccacccgccttggcctcccaaagtgctgagattacaggcgtgagccactgcgcccggccggtcatggctttttattgctgtgttcacagctctgtcatctttctggcgcattaggcttcctgcaaggcttggacttccagccttggctcctctgctccagtgctgtggacacggaccaaggagtgctctcctaggaatgatcatgtctcaccagtgccctggtgaagaaccttgcgcagagccatccatgaccaactgtggcatttcccgaggtgctgggcatggattactgttagtaagataagtgactcgaggtggcataaaggcgtgatgatgtcctttcacacagcgaggacgtgattgcctcttaaattctctcggttgactctgggaatacgtctctatttggtgttactccggcttttcttgttttgttgtggtaaaaaacatataaaatttaccatcctaactttttttttttttgagatggagtctcactctgtcacccaggttgcagtgcagtgcacgatctcagctcactgcaacctcccgaattcaagaatttctcctgcctcagcctcctgagtagctgggattacaggaatctgccaccatgccttgctaatttttgtatttttagtagagacgggatttcaccatgttggccaggctggtattgaactcctgacctcaaatgatcctcctgcctcagcctcccaaactgctgggatcacaggtgcccaccaccacagccagttattttttgtatatttagtagaggcagggtttcaccatgttggccaggctggtctcaaactcctgacctcaagtgatccacccacctcagcctcccaaagtgctgggattacagcaggcatgagccacagcacccggccatcctaaccatcttttttttttttttttttttgagttggagtcttgctctgtcacccagtctggagtgcagtggtgcgatctcagctcactgcaacctctacctcccgggttcaagcgattctcctccctcagcttcccaagtagctgggactacaggtgtgcaccaccatgcccagctaatttttgtattttttagtagacatggggtttcactacatgttgcccaggctggtctcgagctcctgacctcaggtgatctgcctgcctcggcctcccaaagtactgagattatagtcatgagcaccacgcccagccatcctaatcattgtgtgtgtgtttgtgtgtatgtgtgtgtgacaaagttttgcccttgttgcccaggctggagtgccatggcgcgatcttggctcgctgcaacctccacctcccgggttcaagggattctcctgcgtctgcctcctgagtagctaggattacaggcacccgccaccatgcccagctattttttgtatttttagtagagacaggttttcaccatgttggccaggctggtctcgatctcctgacatcaggtgatccacacaccttggcctcccaaagtgctgggattataggtgtgaggcaccgcgcccggccatcctgaccatttttaagtgcatagctgagtggcattgaatacattcacctggttgagtgaccatcaccaccatccatctccagaactttcacaccttcccaaactgaaactcttcccatgaaacattcactccccacccccactccccagcccctggcaccctctatcctactttctctctctatgaatctgacaactctaggaatctcatatgagtgggatgatacaggatttgtcctttggagactggctaatttcactgagctatgacgtcctcaagatttatccacattgtagcatgtgtcagaatttctttcttttttatggctaaataatattccactgtatggatataccacgttgtttttatccattcatctgttgatggacacttgggttgcttccacctcttggctgttgtgaatagtgctgctatgaacatgggtgtgcaaatatctctttgatagtctaatttaaactccttgggatatatacacataagtgggattgctggatcataggatgattctatttacttttttgaggaaacgccatactgttttgcacagtggctgcaccattttgcattcccaccaataatgggaatttccaacttcttcacatcttcccccacacttcttattttctaatatatatcatatatatataatcatatatacagtgttattatattagcatattcgatcatatatagtgttattagtcacatagattatatatatattttttatttgtgtaaatttactgggtacaagtgctatctttgtttttgttttcatttttattttgagatggagtctcactctgtcacccaggctggagtgcagtggcatgatctcgactgactgcaacctccacatccagggttcaagcaatcctcccaacctcagcaccacgagtagctaggattgcaggcatgtgccaccatgcctggctaattttgtatttttagtagagacagggtttcaccatgttggccaggctggtctcgaactcctgacctcaggtgatctgcctgccttagcctcccaaagtgctgggattacaggcatgagccatcatgcttggcctcctttttgtttttgagacaaggtctggttctatcgctcagggtggagtgcagtggcgtgatctcagctccctgcaacctccgccttctgggttcaagtgatcctcccaaccttggcctcctgactagctgggacataggcatgtgccaccaagcctggctaagttttgtattttttgtaaagaaggggtcccgctatgttgcccaggctagtcttgaactcctgagctctgatatataccatacatatatgatatataatatatatcagcatatatatttacgaggatatatatatgcatgtatatgtgtgtgtgaggcaatatatcattgcatttccctaatgactaatgatgtcgagcatctttttcatgtccttattggccatttatacatcttctttggagaaatgtctattcaagtcctttgcccagtttttagttggattattggatttttgttgttgaattgcagaaggtatccttatgtattatggataccaacccctcatcaggtatatatttgcgaatgttttctctcattctgtaggttgccttttcgctttgttgattgtgtcctttgacacacaaaaaattttaagtttgaagtaatcccatttgtctatttttggcttttattgcccatacttttgtgtcatattctttttttaattaattaatttattttttgagacagggtctcactctgtcgcccaggctggagtgcagtggtgcagtctcgtctcactgcaacctctgcctcctggattcaagcaattctcctgcctcagcctcccaagtagctgggactacaggcatacgccaccacgctcagctaatttttttgtatttttagtagagacggggtttcacgaactcctggcctcaagtgatccacccaccttggcctcccagagtgctgggattacaggcgtgagccaccatgcccagccattttgtgtcatattcaataaaccattgcagaagtgaacagaacaaacttttttcagcctcctaacttttctatgtgctgctcttctccctaaaaggtctcttctttggcccagctaactcttatttgtctattaatgctaacttcttgtgggaagacttccctgactatccctgggcccaaaccttgggtgtacacccagaggaatagaaatcattctatcataaagatacacggaagtgtatgttcattatagcactattcacgatagcaaagacatggaatcaacataaatgcccatcaacgatagactggataaagaaaatatggtatatggccgggcacggtggctcatgcctataatcctagcactttgagaggccaagacgggcggatcacctgaggtcaggagtttgagacaagcctggccaacatggtaaaaccctgtctctactaaaaatacaaaaattagccaggcatggtggtgggcacctgtaatcccagctgctcaggaggctgaggtgagataatcgcttgaacctgggaggtggatgttgcagtgagctgagatcacaccattgcactctagcctgggcgacaaagtgagactgtgtctcaaaaaaaaaaaaaaaaatcataataatccatataacaaactcccatgacacaagtttacctatataacgaatctgcacattttcccctgaacttaaaagttaattttttttttttgagatggagtctcgttctgtcacccaggctggagtgcggtggtggggtctcgactcactgcaagctccgcctcccgggtttaagcgattttcctgcctcagcctcccaagtagctgagattacaggcacctgccgctatgcccggctaattttttgtatttttagtagagacgcggtttcaccatgttggccaggctagtctcaaacccctgacctcgtgatccacccgcctcggcctcccaaagcgctgggattgcaggcgtgagccaccgcacccggccaaaagttaaaattttaaaaaaagaaaaacaacagccaggggttatgtctcgagaccatccacagggggataaaaaaatgtcttctctaaattgcaacaaaaaatagacaatcatgaacaaccccagtcataaaatcatcatctccgtgatcaccaccagaccatcagcagccaaccaaccccctaaaacagctccggctttacagttcttgggtctgtctgagagagacctcaatgcatgcatgttccaaaccaagagaacccgaaggtcacttctgaagtcacatcctctatccacccgccaggcaaggccaaaacaaacaggagctgataagccggctctattctgagtagagaagggtcagcttatcacccagccggccctgccctaaatggaaagacacgtccctctccttggcccagagacgggaatgtgttcaacagcacagaaaaataaaaaaatgaaagaaagaaataaaatgactccaagtagagttcattccgttagaatggagttatccagcctcagcactgtggatacttgggactgcataattctttgcatagggaccattctatgtgcatgggaggacattgaatggcaccccggcctctaccatcccgattccgatagcagctacaccccagttgtgacagagtctcgctctgtctccaggctggagtgcagtggtgcgatctcggctcactgcaacctccacctcctaggttcaagtgattctcctgcctcagcctcccgagtagctgggattacaggcacgtgccaccatgcccagctcgagagcagcctggccaacacggtgaaaccccgcctctactaaaaatacaaaagttatctgggcatggtggcgggcgccttcatcccagctacttggaggctgacgaactagagattcgtcatacttttttgacttttacccattaatagatcttgctcatttttcaggaaaagcatagaaaacaagacttagagtgttacttttaaaaatggtatattattattattattattattattatgtaaattactttttttgagacagggtcttgctcttttgcccaggctggagtacagtggtgccatctcggctcactgcaacctccgcctcctgggctcaaatgattctcctgcctcaccctcccaagtagctgggatgacaggcgcccgccaccatgcccagataacttttgtatttttagtagaggcggggtttcaccgtgttggccaggctgctctcgagctgggcatggtggcacgtgcctgtaatcccagctactcgggagggtgaggcaggagaatcatttgagcccaggaggcggaggttgcagtgagccgagatggcaccactgtactccagcctgggcaaaagagcaagaccctgtctcaaaaaaagtaatttacataataataataataataataataatataccattttttaaaagtaacactctaagtcttgttttctatgcaatgacatggaaaaatgagcaagatctattaatgggttaaaagtgcaaaaaagtataaagcgtgatcccattttcacaaaatgtgggtattatatatttatttgggtgtagataaagaacataaggcaatacatatgtagttgtctgtgtgtgtgtttatagcattctaggaggatatacaaatattcatagtggttgagatcactacaggagacttccacgttctacatttttgtgtcatttctttttaaaatgtgtattgctaaggctgggcatggtggcttgcacctgtaatcctaacgcttggggtggtcgaggtgggcagatcacgtgaggccaggagtttgagaccagcctggccaacatggtgaaaccctaactctactaacaatacagaaattagccgggtgtggtggcaggtgcctgtaatcccaactactcgcgaggctgaggcatgagaatcacttgaacccaggaggcggaggttgcggtgagccgagatcacaccactgcactccagcctgggcgacagagcgagactctgtctcaaaatatgtgtgtgtgtgtgtgtgtgtgtgtgtgtgtgtgtataatgtgtatatatataatgtatatatctatatagtattgcttttttcaatacagcaattttttaaatttttacttgtggcaaatcacacataacataaaatgtatcattgtaactattattcagtgcacagttcagtggcactaagtgcattcacatggctgtccagccatcaccactatcatctccagaacgttctcatcttcccaaactgaaactctgtctccatgagacactcactccccatcccccctccccagcccctggcacccactgtcctactttctatctccatgaatctgatgactctagggacctcatgtaagtggaggaaggggatatttgaaaaacctcagaatcatcattagtgatttgcgggttccagctatacacgggagatctcagagaggcaaactaatcctatggaataaaggagtgcccctttccatcttctagagagatgggaaccagggatgaagattccaagaatcccgacagaggccagaaacaatggtcatgttcctgaattgattgtttcttgctttttgggaagggaggatgaaagaaaccaggcccaccatgccccagagcccaggccaatttaggataggagtgcagcttccacatggaatcttggcacaatctggacatcctggggtccaaaccctctttgtgggcagggaatcagaggcactgtcccagttggcatggggttggggtgctctcgagcagccagagagacctggacaaggtttcctggccaggcatggtgactcacacctgtaatcccagcactttgggaggccgaggcgggtggatgacttgaggtcaggagttcgagaccagcctggccaacatagtgaaaccccatctctactaaaaatacaaaacattaaccgagtgtggtggtgggcgcctgtaatcccagctacccaagaggctgaggcagaagcattgcttgagcccaggaggtggaggttgcagtgagctgagatcgcgccactgcactccagcctgggtgacaaagtgagactccatcacacacacacacacacacacacaaaaaggttttctctctctgagcctcagtttcaacatctgtaaaatggcagtatcctaacagggcccacaaaaccacaatctataaaagactgataattggctttcaccaaaattcaaactcatgctattcaaaagataccagtgggaaaatgaaaaagcaagcacagatcgagaaaaaatatttgcaaagcatgtatccccacaaagggcatggatattaaacacgtaaagaactcttacaactcaacagtaagaggacaaatctggccaggcgtggtgggtcacgtctgtaatcccagcacttcaggaggcagaggtgggaggaacgttttagctcaggggttcaagaccagccaggacaacataacaagacctcatctctacctcgctctgtctccaggctggagtgcagtggtgtgaacttggctcaccacaacctccacctcctgggttcaagcaattctcctaacatttaaaaaaaaattgtttttaattagccaggtgtagtagtgcatgcctgtagtgccagctactcagaaggctgaggcagggggatcccttgagcccaggaggtcgaggctgccatgagctgtgattgtgccactgcactccagcctaggggacagagcaagaccctgtctcaaaaagaagaggaagaagaagaggaagagggacaggaacaggaacaggaagaggaggaggaggaggagaacaaatctaatattgttgacaatctagttttttttaacgtgcaaaagatttgaacaggcacttccccaacgaagatatagagatggcaaataaacacccgaaaaggtgtttaccatcattattcattaagaaaaaacaaattaaacccacaattgagataccactataagcctactagaatggctaagactaaaaataacactatcaactgctgtcaaggatgtggagaaactggaactcccatacacagctaaggggaatgtacaatgatacaaccactttggaagcactttggtggtttcttgagaagttacacacacacttactgtacaaatcaaccattccaatcttgattgtcgacctatgacaggtaaaagtatatatccatacaaagatttgcaggtgaatactcatagctccatttatattcaccaacaaataaaagcaaatccaatgtccatcaacaggagaataaataaacatactatggtatatttgaacaatggaacattattacttaaccattaaaaaagagaataggccaggcatggtggctcatgcctgtaatcgcagcactttgggaggccaaggcgggcagatcacttgaggtcaggagttcaagaccagcctgttcaacatagtgaaaccctgtctctattaaagatacaaaaattagccagacttggtggcatgcccttagtcccagctactcaggaggctgaggcagaagaattgcttaaacctgggaggtggaggttgcagtgagccaagatcgtgccactgcactccagcccgggcaacacagtgagaccctgcttcaaaaaatatgtatatataaattaaaaaaagagaacaaactatggacaccaacaacagcatggataaatctcaaaatcactatgttgagtgagcatactgtatgctcagacaaaaattagcacatgcaccttgattctatttatatgaaatactagaaaatgcaggctgaaatgtaatggcacgatcttggctcactatcacctccgcctcccgggttcaagcgattctcttgcctcagcctcttgagtacctgggattacaggcatgcaccaccacaactggctaatttttgtatctttagtagagacgggacttcaccatgttgcccaggctggtctcaaacccctgaactcaggtgatccgcccgcctcggcctcccagagtgctgggattacaggcatgagccaccgctcccagcctggttcacttctctccaaatccttcatgtcccacctgtaccaacctgaggcagctgcctcctccttgatggcctagtgtccactcctgccccctagagtccattctcatcactacagccacggaattctctttgttttaagtacataataatccatggggtgctcctcccattactgggctgggaaagccaggtcctggagttggcgctagaaaatggtccctgccctcttggaggttacggttgaatcaaacaactacacaaataaatatactcttacaaatggaagtctgtaccattcactggtacattcgaccctatcatactggtgcttctttctaaaactcagctggcactccagttctcttttgagtagaaaataaaaaagaaaacaatttttaaataaagtaaaacacagctggtctttcattcctctgccactgtcagctatttcaaccaaaaagaacctctcctcctggaaaactcttattcacccgtcaaaacccagcttaaagtttacttcccttgacccacttttctactacatctcagaaaatgagatcttcctttcactgtgatactatggaagtcaataaacctctgaagcattcaactcaagaagtcctagagaaataagctgagaaaggaatttgtcctgggtaacaaaagtggaactttatccattaaaacacataaaaacgctagaataaagaaaaaaatttgggaaatagaatttgttttctttttctgtttcttgaataaactctagccagtttattcaagaaacagaaaaagaaaacaaattcaatttgccacaacagaaaggtggctataaacgcagatttagagttttttaaaataaaagagtatgatatacaactctatgctgaaatttaaaaaatctcaatgaaactgagctttctgtaaacatgtaaattatcaaaattaattcaagaaggaatagaggtactgaatgcataactaaataatgacgaaagaaactaaagatattatgaaaaataacctccaaaaaggtcaatcccaaatggtttatggaatcatttaaccttcaaaagttcaagaaatagataaagatttctaaggtttatggactcattaaacttcaaaagttcaagaaatagataaagattcctaaaatagatgagaaatttcctaatcattctataaacagctcaatcctggtacaaaacctgactatctaccaaaaaatttttaagaccaagttctctgtctctctttctgtctctctctctcatagatacacacacacacacacacacacacacacacacacacgcagctaattaaataaaactaggttcactaactctttttttttgaaacgggatctcactctgctgctgaggctggagtgcagtggttcgatcgtagctcatagcagcctccacctcccgggctcaagcgatcctcccacatcagcctcccaagtaactgggactacgggcacacaccaccatgcccggctaaggttcacagactcttttcgataattctgaaaacctaaatgctctgggcacaacaaatatttggcataaatttggcaccaaaactaagttggtaaccaacttcactaaaagtgatattgtctatttatattatttatgacacctatatgaatattcatggattttctctgctgaaatattaatgtgcttgattatgaggtccccctatatacaccataagtggtgttaggtagtaacacactatatgcactctattgaatatatgtgtgtattaaaataataaatgatatataattaataaattataataaataattaagaaaaataattaacaaaaattattaataaataataaaactacatccgagtttatggccacctttctgttgtttagataattgaatttttctttttctgtttcttgaatagactttatttaagaccctagaggtctataccaggaacacatgtatgaatcaatgtaggcagcaatgtgttggaactggctcagaatgggtcacactggccaatgggcagcatctcttcccaacctacccttagtgccatcatcttgggtagcttgaatcacccacagtggaagtatttacaccactggaattggcaaatgctacaaatttggaactctctttttttccattggccagcaccttcttaacactgggaaatcttttaaataaaactcactgtctgtaggtaaaagaaaaaaaaatagtgcttgttcatctccaaagaagtcaaacagttgttagataaaatctcttttttttttttttttgagatgaagtctcactctgttgcccaggctggagtgtaatggtaccatctcggctcactgcaaactccaccttctggattcaagcgattcttgtgcctcaacctcccaagtagctgggattacaggcgcgtgctaccacgcctggctaatttttttttttttttagtacagacagggttttgccatgttggccaggctggtctcaaactcctgaccttatgatccgcccacctcggcctcccaaagtgctgagattataggcatgagccacactgctcagccattgtttgataaaatctttatccatttctgatataaaagtttagtaaattagtagtgggaggatatttttattgtctagtgggggcagtatagcccaggtaaacaccggagttctattgcctgtgtttaaattctgattcttccactttctggtttttcatgggttctctgagcctatgctttctcctatgcacatgaaataatattagtacctacctctgaaggctatctgcaggaattaagtgaaataatttctgtaaagtgcttagaaaaatgcctgacgaatattaatagtaagaacctagtaaatggtagctagtgctatgaattgttaaatataggaaaagattatattttctggataataagtggttctacctcaatcactgcatcatgtttaacaaggagtccgtgtgcagtggctcatgcctataatcccagtacgttgggaggctgaggcgggcagactgcttgaggtcaggaattcgagacctgcctgggcaacatggcgaaaccctgtctctactaaaaatacaaaaattagccgggagtggtggtgtgtacctgtagtcacagctacttgggaggctgaggcaggagaatgttttgaactggggagatggaggctgcagtgagctgagatcatgccgctgcactccagcctgggtgacagaccgacactacatctcaaaaaaataaaaataaaaataaataacaagggggctgggtgtggtggctcacgcctgtaatcccagcactttgggaggctgaggtgggcagatctcttgaagtcaggagtttgagaccagcctggccaacatagtaaaaccccgtctctactaaaaatataaaaaaaattagccaggcatggtggtatgcgcctgtaatcccagctactcaggaggctgaggctggagaaccacttgaacccagtaggtggaggttgcagtgaaccaagatcatgccactccactccagcctgggtgacaaagcgacactctgtcttaaaaaaataataataaaaataaataacaaggaaacacaagctttcttgttacaattagggaagtaatatgttgtcattattagaatttctgatttcatcagttaacatttagatgtcctgaccagcatggtatagcacacacacacaaaaagaaatagtagtactaagagaaaagggcctcagataatttttatttaccgataattaacctatttgccctagaaaacctagctgaaaaactattcaagttaacaggaatttagaaagacaacaaggtacaaaatacttaaatattaatagctttctgatagactacccataatcagaaaatataatggggaaatgaactattttataatagcagcccaaaatatgtataaactaggaatagaattgataataattgtataagacttatatgaatgaaatcacaaaattttaaggaatctaagaaactaaacaaataaatattcctggttgggaagaatattttgaagctatcactatgatacagacaagaagagagagagattaaaaagaaaagaacagaaaatccttaagcagaccctaatatggataactatttgtatttataaatgaacaactttaaatcagaatgcaaatagctacttattcaataaatgggtcttggacaactgagtaaacatttggaagaaaataactttgaccttcatgtcaacccatacaaccaaataaatactatatggataaaaaaaaaaagttaagtgtagaaaatttccaaaaacacgctgctaaaagaatacttaccaacggtataaatcacaaaggaataggctgattaatttgattagatagaatttttaagcttctaggggccagaaaccacgttcaaaatgttagaagagaaaaacaagaaaagaatatttgaaacatatttgccaaaggacactttatatataagaaatcttagaaagcaagctgggagcagtggttcacacctgtaatcccagcactttgggaggccgaggcaggtggatgacttgaggtcaggagttcgagaccagcctagccaacatggtgaaacccaatctctactaaaaacacaaaaattagccaggcgtgatggctcgtgcctgtaattccagctacttgggaggctgaggcacgagaatcactcgaaccagccatttcttgtttcctcatttccaaactccacaagcctgagacagaaaaagcatgcactttagactgactaccttgagattcaaatcttggctcttccacttttcagctctgtgactgtgactaggaatcatgtttcatctctcagagtctctgtttcctcattgtgttgttggaggaatgatagcaatggatgaaatattgaatcatgtgcctggacataattattgcattattgttgctactcctacctaccatcataatcatcaccaccatcattactgtcaccatcaccatctccaccactataatcaccaacatcaccaacatcaatatcaccatcattgtcatcaccatcatcaccatcaccattgccatctccatcatcatcatcaccatcatcatcaccactgtcatcaccaccatcaccattaccgtcaccatcaccatttccatcattataatcatcaacatcaatatcaccatcattgtcatcaccatcatgatcaccaccatcatcaccaccatcatcactatgatcaccatcatcatcttcattatcatcatcaccaccatcatcatatcaccattatcatctccactgccattatcaccatcgccacagtcaatatcatcatcattgtcatcaccgccatcatcattactatcaccgtcatcatctccatcaccattatcaccagcatcatcaccatcaacaccatcgtcattatcaccatcatcatcaccaccattataatcatcatcaatatcaccatcaccatcataatcaccatcattattaccactgccattatcataatcattatcatcactgtggattactatcatcatcaccatcattaacttcatcatcaccatcatcactatcataatcatcaatatcatcaccatcaccattatcaccatcaccaccaccaacatcattattataattatcattcttgttgctgttattatgttctgtcattaagttcataatgatccagtttgtgataagatgacacactagtgtgggctgctagcttactccctacaaaacgaacacaggagagagagggaagcaaggcattgagggattaatataaaaaccatgagaaaccctgctggtgaacaggtgcatgtgtctggggggccacagtagatcataggacaggagggaggtgggaaaaaggagatttacattccgtttgtgcctttcccctttattgtcctgggagggtcagtgtttgttccatgtctcaggtgggattctttggaagcagacacagaaaaagagttttaggtgcaagatatttattagaggccaacacctatgaaaggaagggagaggaagcagaatcatcagagagggaaatcacagtgcatggtagattctcaacaaagatggttgaacgaataaatacttgaactaatggagttatatgcccagagtggggcagttaacttccatttcttccttccatgaaggtttttttaggtgtgcacttaataataaataatagtgaatatcatttgagtgcacacacaccagacactgttttctaagtactttacatgggtttgctctgaagtaggaatgattatcattggccaggcgcagtgactcacacctgtaatcccagctctttgggaggccaaggtgggtggatcacttgagtccaggagttcaagaccagcctggccaacatggtgaaaaaatacaaaaaaatagccaggcagggtggtacatgcctgtaatcccagctacttgagaggctgaggcacaagaatcgcttaaacccagggagtggagtttgcagtgagccaaggtcgagccactgcactccagcctgggcaacagagcgagactctgtctcaaaaaaaaaaaaaggctgggtgcagtggctcacgcctataatcccagcactttgggaggccaagaagggcagatcacttgaggtcaggagttcaagaccagcctggccaacatggtgaaaccctgtctctactaaaaatacaaaaatttagctaggcgtggtggcatatgcctgtaattccagctactcgggaggctgaggcgaatggcatgaacccgggaggcagagcttgcagtgagctgagatcgccccactgcactccagcctgggcgacagagcgagactccctctcaaaaaaaaagaaaaaaaagaaagaaattagccaggcatggtggctcatgcctataatcccagctactcaggaggctggggcaggagaatcacttgaacctgggaggtggaggttatagtgagctgagatcacgccattgcacttcagcctgggcaacaagagccagactctgtttaaaaaaaaaaaaatatcatcatacccagtgaatacatcagacaaaggaggcacagatgttaagcaactttcccacatgagtggtaagtagaggagcatggaacgtggctggaaataaactggacaggttcctgattgtacaagtttccgttccagctgcagagagagaacaatgaataaatcccagtaacaatgaataaagtcaagaagtgtcatgagagtagaataaagaaagtagaggggtggggggcatgtggagggaggcctgcctgaggtgacttgtgacttcaagtctagagaatgagaaggggccatccgtgaagatcccggaagcagaggggacctggaagagagaacgctgagcagagagaacagcatgtgcaaagtcccggaggctggagagaggtctgtctgaaggacgaaaaggcagcctgtgtgttcgatttgttgggaggaagatataaagcagtgttcataacttcttagtcctgggcctggcactcagcccacactgactaaatgcaacaattgttacaacttcattctaagaggtgggcgcctccgtagctgccctctggggctaagctttgggaagtcccctagccttcggatgtgaatcgtctgccgtgggaacctctcccaggtctggctcaggaaagcttgggaaggtcctaaccggtcagcgagtcattctttctcacgtcctcaaacacagccctggggtcacccccacctaccttccaggaagagggctggggattcagcacccctcccattctcctaagaaacctctgtcagatgacagctgactgcttttttttttttttaaacacaatagtcacattggagaagggaaaaactaaaaaaaaagaaagtgctcaaaagtcatttttatccaaaatatttgtatgtattaactatatattttatgcacactgcaatgactgctgctcaaggcagggttcttaagaaactgaagggccagtcatggtagttcaccactgtaaccccagcactttgggaggccgaggcaggtggatcacttgaggtcaggagttcaagaccagcctgatcaacatggtgaaaccccgtctctactaaaaatacaaaaattagccaggcgtggtggtgcgcacctgtaatcccagccactagggaggctgaggtgggaggatcgcttgaggctgggaggcagaggctgcagtgagctgagatcatgctactgcactccagcctgggcaacagaatgagaccttgtctcaaaaaaagaaaaagaaagaaagaaagaaactgaggccatttatattttaatggatgtttgtgcctgctaggggtagaaacccctgaatggtggagcgaaggcatttaaactgaactccccactgtgggaagcatcacaagacccaagtcccgggctgtgaggttggggaagggctattctggttgacctgaaaatatgactgcaattttgtctgattttgttaggaagtggaatctacctctcagcccttgaatctgggttggttttgtgattttatgaattggtttgactggtagaacctgtgttgtatgaatgacagcctgggagataggaaaggagtgttggggagggagagaggcagagagagggagatagatagatagaattatagatagatggatgcatagatgatgatgatgatagatagatagatagatagatagatagatagatagatagatagatagatagatagatagacagacagacagacagagccaggcacagtggctcaggcctgtaatcctttgggaggcaaaggtgggagaatcccttgagtccaggagtttgagaccagtctgggcaacatagtgagaacctgtccctacaaaaaaataaaaaattagctgtgtgtggtggtatgcatctgtggtctcagctacttgagaggctgaggtgggaggataacttaagcttgaaaggttgaggctacactaggctatgatggcaccactgcactcagcctgggcaagacagcgcaagaccctgtctcaaaaaaaaaaatagatacatactacgtagatagatatatagatagttagagtcgtaggtagatggatggatggatggatggatggatggatgatgtattcgtccattctcatattgctataaagaaatacctgagactgggtaatttataaagaaaagaggtttaactggctcacggttctgcaggctgtacaggaagcagggtgctggcttctggggcgacctcagggaacttacaatcatggcagaaggtgaagaaggagcaggcacgtcttacatggcaggaacaggagcaagagagagtgaggggaggggagaggtgtcacacacttttaaatgacagagtctcacgagaacttattgtcacactgtcacaagaatagcacaaaggggatggtgttaaagccagagatcctcaacctttttggcaccagggaccagtttcatggaagacagttggaaggtggcggttccaggatgattcaagaacattacatttactgtgcactatgatgcactgttgttatattattaccacattgtaatacataatgaaattattatacaactaggccggacccaaggcggctcatgcctgtaatcccagcactgtgggaggctgaggcgggcagatctcttgaggccaggagtgtgagactagcctggccaacatggtgaaaccctgtttctactaaaaaaaaaaaaaaaaaaaaaaaaaaaaaattagccgggcacagtggtgcaagcctacagtcctagctacccaggagtttgaggcgggagaatcacttgaaccctggaggcggaggtggccgtgagctgagatggtgccactgcgctccagcctgggtgacagagtgagacgctgtctcaaaaataaacgtataaataaaataaagacgactcagaaaacaaaatgggggaggtatggaggggagcagagagatagagagaggtgaagtcccttgagggagtactgtttgagcagactaaaggataaagagccagatgtgcctccagggtgacatccacacacctgtccagatgacaaacacaggttctcagcccccaccgtccacctaggattcctgagccctctcctgctgacacctggcagggtgctgagcccatgagctcatgggaagagaggagcccatagccatgaccccttgcccacccgctggacaccctgcccttcctctggggttcccagatgccctggcacagtgctacctggaggaaaaggaagagcgtcagccgggggcagcctctgccttgcgggccagctgctgggatgggagacctccttcccagccctcccccttccagggcaaccagaggagcagctggaaagttccaggctcaggaaatgcaaatagatgaatggagggaagtggacagggacactacacccatagacttgaggctgtcagtcaaaagtgctgaccctggagcctgtcccagaccctgtccgctggggagtcaggctgagagctgggtggcattctcgctccccatccacccatatctacacaaagtccagctcattttgcctctcgaattcccccccgagtcacccacttttctccctcctatggctgggccactgtcctgtcttcctgaatgacagcattgccaccttgccagcttccaggattataccctctaaccattccttccatgcccagttaaagggagctttctgaaacaaagagcagactttgcctcccctccgcataaaacttcccatgtctccccattgccttagggataaaagctaaagctatgccattggacccagacacaatggcctctgtctctagcttcccccattatagccactttcccctttggttctccttgctgtggatgagtgcaatcacctgtggccctgtgcttgtcccaggtccttcacatccttcaggtatgtgctgggcactgcttcctgaggaagcctccctggacttccaagtctggggctcaggggctgctcacctgggctccaactatcacacctgccatattgctttgtgcttactgaataatgcagtgtgggaagggaactgctgtggcatggccctgtgtgccctgatgagtcttctgcaggtgcaagtggtgagcagaggttgtccactgcaccatctgtgtgagttcaggtcactggcagagacaggcagggttagcaatacgggtgcccggcccctcggccaacgtgcctaacacaggttcccagaggctgtgtctctcaacatgccgttaacaaagcagatgttctaaggggttctgcatgctgcagcctctgggggacagtgtgtcacagagccttgcctcactgagcctcagcttcctcatctacagaacggggccaataaagccaacagggccttcctccttggatggttgtgaagattgcatgagattaaataaactacatagaaagtgctcagagaggggtgacccctcttttatgattcataaccagtgccagaagccacgccaggacacatcttgccattggaagtatgtaaagtaatggcactgtgcttctgtggacatctcattacgagaatgttcagttcttgggttatattaagatgcggttttcctgttgaagcctctaaagtcccttgtggtttctctggggtccaacagcctggatgcgaaaaagaaagagcccagcctgctgccccaccccgtgttactatgagaattggggaaccagcccctggggacacagatgctatcacaaagagtccctgaattggcttgccacatttaacggataaatatataagatactcaggttcctatatttgatctggcaaccctatttccagaagtgtgctaggtactctcacttgtctgaataagtaacatctactgcatatatatagatctatttttctttttcttttcttttctttttttgagacaggatctcactctattgtccaggctggagtgcagtggggcaatcatagctcactgcagtgtccacctcccaggcttaaaggatcctcccatctcagtctcctgagtagctaggtcaacaggtgggcaccaccatgcctggctaatttctaaattttttgtagagacaggatcttgctatgctgcccaggctgatcttgaactcccgggctgaattgattctcctgcctcagcctcccaaagtgctgggattacaagcatgagccactgtgcccagcctaattatctaatctaagctttttgcctacacacacacacacacacacacacacacacacacacacacacacggagagagagagacagagacagagagggagagaactgaaagaggaccaaaagaagaataaagaagaacagtccagctgggtgcagtggctcatgcctgtaatcccagcactttgagaggccgaggctggaggatcacttgaggtcaggagtttgagaccagcctggccaacacggcgaaaccccgtctctactaaaaacacaaaaattagctgggcatggtggcatgcgcctgtaattccagctactcaggaagctgaggcaggagaatcacttgaaccagggaggcagaggttgcagtgagccgagatcgtgctattgcacttcagcctgggtgacagacgaagactctatcacaaaaaaagaaaagacaaaagaaacagttaaaatgtttcttacaacgctaaatatacatttgtcatagcacccagaaattctattcctatgtattttaccaagataaatgaaagcatattcacattgaagtcttgacataaatgtttgtagtgatattattcataattgccaagaaaatatacaatttggccgggtgcagtggctcacgcctgtaatcccagcactttgggaggccaaggtgggaggaccacgaggtcaagagattgagaccatcctggccaacatggtgaaaacctgtctttaaaaatacaaaaattaactgggcgtggtggcacgcacttgtagtcccagctactcgggaggctgaggcaggagaatcgcttgaatctgggaggcagaggttgcagtgagccgagattgtgccactgctgggagacagagactccctctcaaagaaaaataaaaaagaaagaaagaaaaagaaatgccacttgaggtggccacctgttgtccagctactcaggaggctaaggtgggaagatcgcttaagcccctgagaggttgaggttaccgtgggctgaaattgtgccattgcactccagcctgggtgacagagggagaccctgtcccccgacccccccaaaaaaaagaagaaagaaaagaaaagaaaaaagaaaatattagaaatcatgtagacaaattaagactgtagaatttcataaatacatgttctaatttccaatataatttcaactacagtaagatgataatcagatacattccttttggtggttgctattgccgcactcttagatatgaagtgaacagctccctgaaattcgcactctctgggcttctgggaactatattttcatcattctttggctcccgtctgtgcttttctgagacatgcctgttcacaccctttctttctctttttttcttttcttgctttttcttcttctttttttttttttgagacagagtctccctctgttgcccaggctggagtgcaatggcgcgatctcagctcactgacgcaacctctgcctcccaggttcaagcgattctcctgcctcagcctcccaagtagctgggtctgtaggtgcccaccacctgcccagctaattttcaccatgttggccagtctggtctcgaactcctgacctcaactgatccacctgcctcagcctcccaaagtgctgggattacaggcatgagccaccaagcccggccccaaattcttaattttctatttctgttgtgtttttttcttatcaatgtgtgaaatctctttgcatataaaggtaccaacccttctcaggcaaccaattcatctttctttattgcttttgtatatacttccctgataatttataaaattattctgttagttatatttatttttattataagatttttaacagatgtttatatagttttttgtttgtttcgttttgttttgttctgttttgtttttgagacagggtcttgttctgtcacccaggctggagtgtggtggtgagatctcagctcactgaaacctctgccaccagggttcaagtgattctcctgcctcagccttccgagtagctgcaattataggtgcccaccaccacacccagttaatttttgtatttttagtagagacaaggtttctgcatgttggccaggctggtctctaactcctggcctcaagtgatccacctgcctcagcctccccaagtgctgggattacaggcatcagccactgcacccggccacgtttatatagatttttatgtattaagtatttctgtggtttcattcatagcttctgggttttctgtcttagttaaaacacacacacaacaatttcaaaaaaagcatgttttcaaccctcaattgtaaaaatagccttgtaaattccttctatgatctgtattggtttattgttcacatttcatctttaacccaactgaaattatgttgttttctgcagcacaggaatatttcactctgccacgtctctgtcaaaagtgggagaaaaggccaggtgtggtgactcacatttgtaatcccggcactttgggaggccgaggaggaaggatcacttgaggccaggagtttgagaccagcctggccaacacagtgagactactccaagaaaaaaataagcgtggtagaaggaagggcaaacccgtgtctcacaccccatggccctcactaactcaggctgctgcctggcccctgtaagccttccggctttccacaagggtcggttttttttcctgttttgctttctgtggtctttctggccagaggagaagccatggggaagtgctgcccccacgtggccatctccatgatagcagctaaggctggaagaaaaaggctttttgttgttgttgtttgagatggagtcactaggctggattgcagtggtacgatcttggctcactgctatctctggctcccaggttcaagcgattctcctgcctcagtctcccgagtagctgagactacaggcgtgtgctaccatgcccggctaatttttggatttttaatagagacggggtttcaccatattggccaggctggccttgaactcctgacctcacgatccgcctgcctcggcctcccagagtgctaggattacaggcatgagccaccgcacctggccaaggcatcttttaaagctgaaagcaaaataggttcacaggcccctgcttaaaaccctccaggggcggctgatgcctgtaattccagcattttgggaggccgaggtgggaggatcacttgagcccaggagtttgagatcagcctgagcaatatagcgagaccctgtctctacaaaaaataaaataaggccgggcagggtgactcatgcctgtaatcccagcactttgggaagccgaggtgggtggatcacctgaggtcaagagttcaaaaccagcctgaccaacatggtgaaaccccatctccactaaaaatacaaaaaaaaaaaaaaattagccacgtattgtggtacatgcctgtaatcccagctacttgggaggctgaggcaggagaatctcttgaacccaggagccggaggttgcaatgagccaagactgcgccattgcactccagactgggcaatagggtaagactctgtctcaaaaggacaaaaataaaataaaatagcaaggcgcggtgttgtatgcctgtggtcgcagctactccagaggatgaggagggaggctggcttgagcttgggaagtcgaggctgcagtgagctatgatcacaccactgtactccagcctgggtgacagaatgagaccctgtctctcagaaaacaagaataaaaactttatttacaaaagtaagcattgggttaaacttggcctaaaggttatactttgctgacctgtgttctattgcatatattctgctggacgtgatggctcacatctgcaatctcagcactttgggaggccgaggcaggtggatcacttgaggccaggagtttgaggtcagtctggccaacatggtgaaactctgtttctactaaatatacaaaaattatccaggtgtggtggcacatgcctataatccccagctattcgggcggctgaggcaggagaatcgcttgaacccgggatgcggaggttgcagtgcagtgagccgagatcacgccactgcactccagcctgggaaacacagtgagactctgtctcagaaacaaacaaacaacaccacaaaagaagaaggaaggaaggaaggaaggaaggaaggaaggaaaaaaaatctctccagcggtacatacccaaatgttgaaagcagggactcaaaacaaatgtttatacacccatgttcttttttttttttttttgagatggagtctcgctctgtcgcccaggctggagtgcagtggcgcgatctcggctcactgcaacctccgcctcccgggttcaagcaattctcctgccttagcctcccaagtagctgggactacaggcgagcgccaccacgcccagctaatttttgtacttttagtagagacggggtttcaccatgttggccagaatggtctcgatctcttgacctcgtgatccacccgccttggcctcccaaagtgctgggattacaggcgtgagccaccacgcccagcctatacacccatgttcttagcagcatgattcacaattaccaaaagatagaaataacccaattatccaccaatggaatatgattcagatgcaaaaagaaggaaattctgacacctgctgacatggatggaccttaaagacattacgctgggtgaaagaaaccaggcacagtaggacaaatcctgtgtgattccacttataggaggtccctaccgtcactagattgacagagacagaaagcagaatggtgggtgccaggggctggggagggagatggggagcgagggtttcatggggacagagtttcagtttggagatgagaaagtgctggagatgattgcacaacaatgcgaatgcatttaatgccactgaactgtgcacttagaaatggttaacaagggccaggggcggtggctcacgcccgtaatcccagcactttgggaggccgaggtgggtggatcacctgacatcagaagtttgagaccagcctggccaacatggtgaaaccctgtctctactgaaaatacaaaattagctgggcatggtggcaggtgcctgtaatcctagctacttgggaggctgaggcaggggaatcgcgtgaacccaggaggtggaggttgcagtgagcagagattgcgccattgcatcccagcctgagcaacaagagagaaactctgtctcaaaaaaaaaaaaaaaaaaaaaaaaaaggttaaaatgggctgggggcagtggctaatgcctgtaatcccaacactttgggaggctgagatgggaggattgcttgagtctaggagtttaagaccagcctgggcaacataatgagaccccttctgtacaaaaaataattaaaaattacccgctcatggtggcacgcacctgtagtcccagctactcgggaggctgaggcaggaggattgtttgagcctgggacattgaggctgcagtgagttgtgatcccaccactgcactccagtccaggtgacaaagaccctgtctcaaaaacaaacaaacaaacaaacaaaaacaaagggttaaaatatagaattaatcatgtcttttgcagcaatatgaatggaactgtaggctgttatcatcttaagtaaaacagttcagaaatagaaagtcaaataccgcatgttctcacttataagcgggaattaaatcatgtgtatacgtggtcatagtgcggaattttagacagtggagacccggaaggggtaaaggaggaagggcgggaggggtaagggatgagaaatgacttaatggctacaatgtacattacttgggcgatggttacactaaagcccaggcttcctgctgcgcaatctatccatgtaacaaagttgcctttatactccttaaatgtatacacattttaaaaatcattttttaaatttaaaaaaatggttaaggccaggcacggtggctcacgcctgtaatcccagtactttgagaggccgaggtgggcagatctcttgaggtcaggagttcgagaccagcctggccaacaggatgaaaccccatctctactaaaactacaaaacattagccaggtgtcgtggcaggtgcctgtaatcccagctactcaggaggctgaggcaggagaattgcttgaacctgggaggcgggggttgcggtgagccgagatcgtgccactgcactccagcctgggcagcagagcgagactccgtctcaaaaacaaacaaacaaaaaaggtaaaagggtaaatgttatgttatgtgtcttttcccaccaacgcaagcagtaaagggtagagcaggtggtggccctccctgcgggctggacggggtggtggaggggaaggaagggagccaggtgtgcacagccgaggggtggcctctgcattcggccttaaggccaatatcaggtgtccggggcgcagtggggacagaggccagggttcagagagtggggaagcgtggacaggaagtgtggacggtactcccaaacagcacagagtatttctacagcacagaaatatttcactctgctatgtctctatcaaaagtgggagaaaagggcaggtgcggtgtgtcgtatttgtaatcccagcactttgggtcctgtgacagtcctcctccgcctggctccagccacacctgcttccttctgttcctcaaacaccccaagctcagtcttgcctccaagcctttgccctggcagtttttaccacccagaataactttcccctagattttttttttctcactctatcacccaggtgggagtagggtggcacaatctcggctcactgcagcctctgcctcccagattcaagtaattctcctgcctctgtgtcccgagtagctgggattacagacagacgccaccacacccggctaatttttgtatttttagaagagatggggtttccccatgttggccaggctggtcttgaactactgacctcacgtgatccacccgcctcggcctcccaaagtgctgggattacaggcgtgagcccccacgcccagctagacattgatttatatgcctgacttcttctgagcttacagatctcagctcaaatggccttccctgaccttcccagctaaagcatcaacctcccccacccactctatcgcatcactctgtttacttcctgttgcggcaattcacagcacctgaatttatctcctaggtgtgtttcctgattcactgtttgcctcccccagctggagctcctgcagggcgggggtttgtgtctgtcttgttcaccgtgatcccacacctgccacagtgcctggcatacagtaggtgctcgataaatgcatgttgcctgaaagaaataatcaactggttacagaatgggtgtgtgcaaatctgtgtatatctgtgtctccttgtgttctgtgtgtgtctcgttggtgtgattctggggatggccccacctgtgtccccagggacaagcgcggcgctatgggccagtgagtgtttgtggtgagggctttccgggtctgtgtgttagtgattttgagtggtcccgtggcaaccggtgtgcaagtcagtgtctccagaggtgttctcagaggtggccagcatctgctcttttttgttgttgttgttttgtttttgtttgttgtttaagatggaatctcactctgttgcccaggctggagtgcagtggcatgatcttggctcacggcaacctccgcctcccgggttcaagccattctcctgcctcagcctcccgagtagctgggattacaggcacatgccaccacacccggctaatgtttatatttttagtagaaatgggttttcaccacgttggccaggctggactcaaactcccgacctcaggtgatccacctgcctcggcctcccaaagtgctgagattataggcatgagccaccgcgcctggccagcagcatctgctcgtgtgtgtgtgtgtgtgtgtgtgtgtgtgtgagtgttctgtgtgactgtggctgtgagtccacatgtgtgtcggggtgtttgttgtgtatgtgtgtctgcatgcccattctgcatgtccacatgacactgcatgctcctgtgtgaagttgtgcccatgagcacacgtgtctgtgtttgcgtatccttgtgtgtcctctgggtgtgtccttgagctttgtgttccaggagcctgcagccctgttgtgcagcgctgttgtgctctgttgtgcacgtgcatgtgtctcgtgtcctctgtgtgtggggtggctcctacatgtagttgtgcacacttgtatctgcctctgtgagtccctgtgcctatgtgtgaccatgtgtgaagtgtgattgtgcagtatcccaaaaccatctgtgtgcaccgctgtgcagtagtgtgctggtaaatgttgaacctctccagtggagagcactgatttatagcattgccagtcctcatggtgtaaatactctcgccacagccaatttcaagtgatgccaccgaacagtgagtcagaaagatatggacagcagcaaaccattatacagtatttctaccaaacaggttccatacacaaaagcaacatcaaaagcatagattatgaggccaggtgtggtggctcacacctgtaaccccagcacttccggaggctgaggtgggcgaatcctctgaggtccggagttcgagaccagcctggccaacatagtgaaatcccgtctctactaaaaatacaaaaattagcctggtgtggtgggggtcacctataatcccagctacctgggaggctgaggcaggagaatcacttgaacccaggaggcagaggttgcagtgagctgagattgcaccactgcactccagcccgggcaacagagcaagactccatctcaaaaaaaaaaaaaaaaaaaaaaaaaaaaaaaaaaggaaaaggaaaaaaagcatagattatggaaaatgcagcaaaaataatgttaaagtgattaatttaaatgtggtaaaataggcataacgtaaaatttaccattttaactttctttaaaaaaaatgggatttcactctgtcacccaggctggagtacggtggcacaattataggtcactgcagctttgaacacctgggctcaagtgagcctccccgcctcagcctccggagcggctgggactgcaggcaggcaccaccaaatgtggcgaagttttaaattttttgtagagtactcactccagtgacaggctgaagccagcccaagagccaagtttagtggagcatcatggctcatgcctgtaatcccagcactttgggaggccaaggcgggtggactgcttgagcccaggagtttgagaccagcctgggaaacataataaaatccctgtctctacaaaaaaaaaaaattaacttaggctgggcgccatgtctcgtgcctctaatcccagcactttgggaggccaaggtgggaggattgcttgagcccaggagttcgagaccagcctgggcaatatggtgagaccctgtctgtactaaaaatacaaaccaaaaaaaaatagccaggcgtggtgatgtgtgcctgtggtcccagctactcaggaggcggaggtgggaggatcacttgagcccaggggatggaggttgcaatgaaccaaaatcacccccactgcactccagcctggatgacagagtgagagcctgtctcaaaagaaaaattatatataaaaaattatatataaattatatataagtctatatataatccatatataattatatataaagtatatataaattatacataaattatctgtaaacaaaaaacttagccaggcatggtggcatgtgcctgtaatcccaactactcaggaggctgaagcagaaggatcacttgagcccaagagattgaggctgcagtgagctatgatttttccactgcactccagactggatgacagaatgagaccctatctctaaaaataaaataaacagttttttgttgttgttgttgttgttttctaaaaaaagccaaatctgagcatttcctatcaactccacactcggtgacatcacactggtaggtgaaatcggccatgctgggggtatttacaccaggagaattggcaatggctacaaatcggagaggtggttgttaaacgttaccagcacaccatgttgttccgccagcttccaggtacccatgtaacaatgtagccacgtgtgtttctgtctctctgtgtgtacccaccatgctggtgtgtgtctgggtgcctgagtctctacggatacacatgacctgcacgtccctatatgttgctgtctatacacccatgtgcctgggtgaggcccccacaccctgttcctcttcagcagttggttccacaggaagctgctggggtgggggttgaggacgctgggcctccctccagctccccacccctcctcctcaagacacctgcatgcgcagggctgaggggtgggagcagggctctctgcctccagaacccccatcctctgggctctttttaggcccctagattggcctgcagctgggagcagagtggcaagcatgcaggcaggcagttgagaaagaggaagtcgaggtgctattgggtcattctgtggttatcccaggctctacccagccagcggttcccttgggccagctcgaaacgctggccgtaggtcatgggagctgcaggagctgttagccaggctaggtgcctgcaggttgaagaactgagctctatctggtaagtacttatcctgggaagtggagagagatggacccatcgggacagagtggcagtggggtctgggaagtctagggggacagcgagcagacatacatcactgtttctctcccccttgcagtcaacttgcttcctgagtgggtgggggaagctgtttgacccttgcgttcattgtgcagagatctgtggtcataagaggtcaccccaggggacggggatccttgaggggctgctaggtaagaaaggagggtggaggccgggcgcggtggctcacacctgtaatcctagcactttgggaggctgaggagggcggatcacttgaggtcaagagttggagaccagcccggccaacatggtgaaaccccgtctctactaaaaatacaaaaattagccaggcgtggtggcgggcagctgtaatctcagctactcgggaggctgaggcaggagaatggcttgaacccgggaggtagaggttgaagtgagcctctcagtctcaaaacaaagaaaagaaaaagaaaagcaaagaaaggacgatagagctccttgtagccaaggccctcctgcgtggagacaggagacagagaatgaatgggggagctggggcaaaggctcaggtgccctttgcatcttaaactgcagattccgggccccccaagaacctccctgttgcagattctgaatccactgtcaaaacaaactcacacttaaggctgatggctgacaaccagccctgagaagggtcttgtcctgatctgaaatcatccagagagcacatccctccacccaggcagccttcctccaggtgagggttctcccccttgggagacatcccctgtctcctctcgtggccccttcttagggggacctcctgcaccaccgcctgcctgggactgggaggggtgggggaggaaggctgcggtttctgctgggcacacccagtctgttgtttcctgccagcccccaatgctgcagggcaggcttcaggcaccctgaggtctaggaaggtggccccagaaccaggagggagtgaattgagctagagtggacagctggggccagagaggatggagctaggaagtgacgctgggggctgatgctccaaggccaggtcacctgcagttctgagaaaagaacatgacaaccaaaggaggtcaggaaagggttgccctcataatcagccacatttcaactcccttgctgtgactgggagtcactctgggagggctgcttggtagaggcagccttttcattatgccttgaagaaccagtagatggcaactgcaaacacgtcggtgcttctggtctgggctgtctcccatgcctccctgggcatcccctagcccatgacaaagggatgggcatatgttgatgctcgatactgttgtagatgacatggtgactgtgttggacagctgggcgttcaaatcccagttccctggcctctatgtggccttgggcaaatgacttaactgctctgagctttcgtttgctcatctgttaaaaggctgttgagttttttggggtgggtgtgtgtgtgtgtgtgtgtgtgtgtgtgtgtgtgtgtgtgtgtgtgtgtgttggagatagaatcttgctctatcgcccaggctggagtacattggtgcaatctcagctcactgcaacctccgcctctcgggtttaagcaattctcctgcctcagcctcccaagtagctgggattacaggcacacgcctccatgcccagctaatttttgtatttttagtagagacagggtttcaccatattggttaggctggtcttgaactcctgacctcaggtgatctgcctgccttggcctcccaaagtgctgggattacaggcatgaaccacctcgctcagcctttatgaagtttggtctgtgagatcttagtgcagtgtctggcacgtaatagatcagaaaacattgtcagcctcacctatgccttcatactgaccttgtccccaggccttccttcctgagcagtcccaccatcttctgaaatgttctgggtcatacccatggtggatctcaatctgtaagcaagtctgctagagtggacttcttttgtttgtttgtttgtttgtttgtttgtttgttttgagatggagtcttgttctattgcccaggctggagtgcagtggcacgatctcggctcactgcaagctccacctcccgggttcacgccattctcctgcctcagcctcccaagtagctgggactacaggcgcccgccaccatgcccggctaattttatgtatttttaatagagacggggtttcaccgtgttagccaggatggtcttgatctcctgaccttgtgatccccccacctcagcctcccaaagtgctgggattacaggcatgacccactgtgcccagctagagtggacttcttaaggatcccatccagccatccctgtatcatatgctactgtattttctctctgcctctctctctctctcttttttttttttttttctgagacagagttgcccaggctggagtgcagtggcacagtctcagctcactgcaacctccacctcctgggttcaagcagttctcctgcctcagcctcctgagtagctgggattataaatgcataccaccacacctggctaattttagtagttttagtagagacagggtttcaccatgttacccaggctggtcttgaattcctgacctcaggtgatccacctgccttggcctcccaaagtgctgggattacagatgtaagccactgcacctggcctgttgtatttttaattctagcatctttatctcctgtagggctgttgctattgtctgtgtttcttcttgttttttggtcatgaggttctgtcttctagtatgcctggtagtctgattaaatgccaggccttgtttgtgaaaaactatagggataatttgtgtctctttatggtgtcattttcctccatagagcgtttatttttgctttgggcaggcagttagagaaaggaaagatcactttaatctgattgtgacctatgctgacttgaagatggattttgctctcggtgagggctagtctatgtctggtccctccttgctcctagggtgtagtcttttaggggtggcaatcacctcctctttttgggccctgaattccaatgtttatttccccaacataagattgctaagagctacattcaggttctcaggctttttctggtctgcctcccactcactcaagaactgtgttcaaatcaacaacttgtttgtgagggaaaagcattacattatgtccttctcactttcctaggtttccttttttttttttttttttttgagatggaatctcactctgtcacccaggctgtcgtgcagtggcatgatctgggctcactgcaagctccacctcccaggttcacgccattctcctgcctcagcctcccgagtagctgggaatacaggtgcctgccaccacgcccggctatttttttgtattttcagtagagacggggtttcacagtgttagccaggatggtctcgatctcctgacctcatgatccgcccacctcggcctcccaaagtgctggaattacaggtgtgagtcgccgtgcctggccttttttttttttttttttttttgacatagactcttgctctgtcatccaagctggagtgcagtggcatgatcttggctcatcacaacctctgcctcccaggttcaagcgattctcctgcctcagcctcctgaatagctgggattacaggcatccaccaccatgcctggctaattttgtatttttagtacagacggggtttcaccatgttggccaggctggtctcgaactcctgacctccagtgagttgcccacctcggcttcccaaagtgctgggattacaggtgtgagccaccgcgcctggcccctaggtttcctttctttccagggccgtgattcttccaactctgactgccaatgccttccaagcaagggtggtttttcactcttccaattttgtccagcttttctatttgttcttggtgggagaataaatctgcaataagctagcctgccatcattagaaatacatattccagctgggtgcagtggctcacgcctgtaatctcagcactttgggaggctgaggtggttggatcacctgaggtcaggagttcgagaccagcctggccaatatggcaaagccctatctctactaagaatacaaaaaattagccaggcatggtagcgggcgcctgtaatcccagctacttgagaggctgaggcaggagaatcacttgaacccgggaggcagaggttgcagtgagccgagattgcgccattgcattccagcctcagcaacaaaagtgaaactccatctcaaaaaaaaaaaagaaaaagaaaagaaaagaaaaagaaaaagaaatagatatccctgttgtatttttttaaagtgagatttagccaggtgtggtggctcacacctgtaatcccagtactttcggaggccgaggtgggaggatcacctgaggttaggagttcaagaccagtctggccaacatggcaaaaccctgcctctactacaaatacaaaaattagctgggcatggtggtgcacgcctgtgatcccagctactagggaggctgaggcaggagaatcgcttgaatctaggaggtggaggttggaggttgcagtgagctgagatcagccactgcactccagtctgggtgacagagcaagactctgtctaaaaaaaaaaaaaagaaagaaagaaaaagaaaagaaatagatatccctgttgtatttttaaagtgagatttggctgggtgccatggctcacgcctgtaatcccaaaactttggaggctgagccaggagggtcacttgaagctcggagtttgagaccagcctgggcaacatagaagaccccatccctacaaaaaagaaaaaagtaaaaaaaatagccaagtgtgatagcatgcatgtacattcccagctactcaggagtctgaggcaagaggattgcttgagccaacgggttcgaggctgcagtgagctatagatcatactactccagcctgggtaacagagtgagatcctgtctcaaaaataaaagttaaaaaataacaggctcatgcctgttatcccagcactttgggaggctgatttggggctgggggtgatttggggctgggaagtaatgtaaacaattgggagactgaaggagggagtcacacagcaagtacgtgctggaggagctgggatttgaagccaggatttgaagcagggatttttcagacacaaggagtgaagacgctgataaaggagcttccaccacgagggggcagcacctgcacggatgagcactcgttgacacacacacaccataccccacacttgggtacagagagaaaggtgatgtggctcaatgcctgcaatcccagcactttgcgaggccgcggcaggaggatcgcttgtgcctgggagttttgagaccagcctgggcaacatagtgagaccccagctctacaaaaaatacaaaacttagccagtgtggtggcacacacctgtagtcctagctactcaggaggctgaggccggaggatcccttgagaccgggagttggaggctgcagtgagctgtggtcacgccattgcactccagcctgggtgacagagcaagacccatctcaaaactaacaaacaacaaacaaaaaacagaaacagatgaagacacaaatatgtagaaacacagaaacccaggcggacaccaaaaccacctcatagatactagaaacagatctccccaagacacagatgagtcatgtagttaaatctgacctcacggataccaatgggcttcacacacacacacacacacacacacacacacacacacacacacacagacaatcacagagacacttttaaaactatctagataatcaaatacacccccacattgacaagctgatattcagaactcaccctgaaacacagaatcacaaacccaaaagcacgtgctctctacacaacatggaaatgcatcatcaaacccaccaagacgatggcacgcacacacacacaaacactcagacatccatgcacacccaggctccccgagggacccagtttgtacttgtatttccctaagattgtcttgtccagccagggtaagaggcctgtaagactgggtttaagggacagagggtgctaaagggcttggcttctcctcaaaccaggggtccctgggcccctgagctggaaaccccagcccccctgctgaagccccaggcttctatcagctgatgtatctggcagaccttggaggcagtctccgcccctcttactggcagccccatcctggcagggattcccaggccagctcacactcaagctctcacacgcacgcatggcccccatggctgactcggtgctcaaccactcctggccggccttctccaagctgtggctgaagcggtgggccttcaagagaggtaagcagctggcagtgaccagcgggagccatccacccaggtggggatcccaggacagcctgcccgccatcccccttcgagctttttcttggctgcagtacagactctgctggcatcggccctggattccatgacccctgattctccagggccccctggaattatcacagacttgtggggtccctcttgtttcagaggaaatgtctcccaagacttggccaggaatttgtctcgggcggtaaatttgcagaaagaaagtccgccctcttaactcagccgctgaactcctcaggggcagcccagcgatctcctgggggtcccagatgctgttggtttctggcccagctgcaggacaggaggctcagggcagaaacaaaaacggggggattagaggctctggggcacacacctccctccaacacacatacacacacacatcggctggtgctctctctctcaacccccagggtccccaggcctcaggtgacctctctggggactgataacagcctttattatgtcatcaaaggcctgagtgaactgttgttgcaaagagagacactttttctttttttttttttttctgagaccgagtctcattcggtcgccgaggctggagtgcagtggcgcgatctcagctcattactgcaaactctgcctccagggttcaattcattctcctgcctcagcctttcgggtagctggaattacaggtgccccccaccacacctggctaatttatatatttttcgtagagacggggtttcaccatgttgatcaggctggtctcgaactcctgaccgcaggtgatccacctgcctcggcctcccaaagtgctgggattataggtgtgagccagcgcgcccagccatcaaagagacacttcttaatgctcaagagtttagcccttgaagataaccagatgatgtcctggtacgtagggcatgagaggacagtgctggacaatatcataaaagctggtcatgcactcattgcctcatgggttttcttgtctccggctccccactgcccatatgagcgcctcctggtcaggccagccgcatcgcttagcctgcatgacttgttagtcacagccaccatcacctgcatgagccacgtacttgttcaaggtagcagtgagttttcatgaaagagggggccaatgtgaagattcgttagctcattcattccactgaccctccttgaaggctcattgtgtaccaggcactgtgccggggtcagggagcagatgggagtgccaggggacccaagggctggggttagggggagagaggatggcctgggaactgggatgcaatagaagagtaatcatcaggataaaagttgttggtggctgttgagctctcatgaagttgggctcagagaggttgagcgacttgctcgaggtcacacagcaagtatatgctggaggaaccgggatttgaagccgattctgtgtgaggccactttgatgtgttctgactgatgaacaaagctgccagtgtgggcagctggagtgcctggggagggtttttagatccaacggtggatggcgatcctgaagaatcagtgtatctgccatggattaccaaagtgtctgcctgtgacccaggtccctaagaagttctgtccctcttgtggctgctcagctcaccctgtctccctgcccaggcagttgaggctgggatttatatgctagcaggtgggggagtgagctgtgggaactgacagtgactcttaaacccttttatggctgatgctgtgggggctgatagtggaggaggctgcctgggactgaatccaggctgatggacagctccttggagagaagcatgggggtggggagcagggtgcatccccaacagagcccctttccctgaggcctcatttctcctctggcttagctcccctgggagagtgactcccttacagcgtgtctcctgtcatcagccttggaaagcagggaagaatggcctttttgtcaccctcttaagctctgtaattggctgtctgggcacctaataggaatttcccggggaaagggtgggattggacttggggtggcaagtaaggcttgagagaggagaactgagaccttcagtgaagggtcccagtgccccttccccatcaactgcccccattacccattctgctcatgctttttcattcattcctcaatctgttggtgcatgtctgatgagtgcagtctgtgcctcgctcaccttggtttccttcctgtgtggctcttctgccacaattctgtccctcttccttctatatgtgcttcctcaccccctcagaatgccatctcctgagtgtaatgcatcgctgcctctggacactgccatataacctatccatcccactatctacccattcatccctgcaaccatgcagccatccaactatctatccagccaaccagccaatcagccaactcttcaaccatccatccttccatccatccatccatccatccatccaatcagccaactcttcaaccatccatccttccatccatccatccatccatccatccacccatccacccattcttccatccattcttccatccatccatccatccatccactcttccatccatccaaccatccatccattcaacatccattcatccatctacctatccatccacccatccactcatacatccaattatctactcattcatccattcacctatccatccatctacctgtccaaccattcatccatccacctatccatccatctacctatccaaccattcacccatctgtctatccactcattcatccatccatccatccttctacacatccacccatccattcaaccatccactcacccatccatccatccatccatccaaccatctatccatttatctacccatttatccaaatatatgggcactgactctgtgcccaacccaacacagcagaggatagcctggtgattgggatctcttctttgaattcagaaacatctgaatttgactcccagctctacctcataccagattggtatggccttggtaaagtcagtgcacctctctaaacctcagtttccctttctataaaatgaggactcagagttgctgtgagtatagaagagtgaaaagtacatgatgggcttagcactaagccagacatatagaaagtgattgatacaagattttaccttttggagcttggggatgtaaaagtggatcagatatagtcactgccctcacagacctcatgctctagagcatggatcagcaaaccttttctataaagagctaggcagagcaatccaaagtcctatggctaaaattgtctgcagaggatctgagacagagccctcagttgccaggcaggaagagtggtaggaacagcacagagataccaggagaatggtgagttgggtgtgcatgtgtgtgacagggaggtaagaggacaggctgaggagggctctgaatgtcattctaaggggactggagtctataggggtggggatcagtagaaggggagtgaccatcagagggttatatcaaaaggacacaccaactccaggacagaagatggactacaggggagagactggtagctgaggatcagtgacaaatgtgattggcaatcgtttggggcaattgtggttggtaattgacagagctcagtctatgacactgggattagggcttagctcataatattggaatcaggacacagcctatgacatcaggattggagctcagtctatgatgccagatcaagattcagtctatgacaccaggattggggctcagtctatgataccaggataagagctaagactatgacaccaggattagggcttagcctatgacactaggatcagggatcaatatatgacaccaggataaaggcttagtctatgacactaggaggggggttcattctatgatacaagaatgaatgctcaaccaatgacagccagatgaagttcagtctgtgatatcaggatcaaggctcagtatatgacaccaggatcatggctcagtctgtgacacaaagattggagttcaatctgtaaaactaggatcagagttgagtcagtcattgggaactaggatcacagttgagttcatcatcaggtcaagctcaacctgttcctcggtcagaagcttccctataaaaacaaaactcagccaggcacagtggctcatgcctgtaatcccagcactttgggaggccgaggtgggaggatcatatgagaccaggagttcgagactagcctagccaacatggtgaaaccccatttcaactaaaaatgcaaaaattagctggacatggtggtacacatcggtggtcccagctactcagaagtctgagacaggagaatcgcttgtacccaggaggtggagactgcagtgagccaagatggaaccactccagcctgggtgacagagcaagactctcttgaaacaaaacaacaacaacaacaacaacaacaaaacatgcacaatcacacaaccctggcatttcttttcttttcttttttcattcttttcctttttttttttctttgagacagagtctcactctgtcacccaggctggagtgcaatggcacaatctcagttcactgcatcctgcccttccctggctgaagagattcccatgtgtcagcctccctagtagctggaattataagcacatgccaccatgcccagctaatgtttgtattttcagtagagactaggtttcgccatgttggtcaggctggtctcaaactcctcacctcaagtgatccgccttcctcggcctcccaaagtgctgggattacatgtgtgagccactgggcccggccaaccctggcctttcacctttgatctttggatcccagaccttcagggttcacagatacagggcatgaggtcctgcaggctacaggaggcctcaggcctccacaaggaccctgtccagtgaagcaagccaaccctgcaggctctcctccagccctaaggggacttggctgaggaatgggactgcctttcccctcccaagctcccaccaacctccaggaccctcccccacatctggctttcctcctccttcacagcctgcttgtttcgtttctgtgagtcatagatgctgcttcggcttctgggtggggaagagaacagatgcaaagcttaacaacagcagctgaacagagtccctccaaccagcccgggagggcaacctggaaagcagtgatggtggaaaccctggcattgctcgttactgtccagccactcatctgtgaatacaggtggcatcagggggcaaatttaccttgaagcaatggaaactgaagcttcaggccccatgtgtacctgccccatccaaagctctgcaagaggctccaacaaaaaactttttaggaacagctttattgagctaccatatacttcacccatttaaagcatacaattcagtggttttaggccaggtgcaatggctcatgcctgtaatcccagcactttgggaggccaaggcggggggattgcctgagctcaggagttccggaccagcctggccaacgtagcaagacccccgtctctactaaaaataaaaaaaattagccaggtgtggtggtgcatacgtgtaatcccagctactcaacaggctgaggcaggagaatcactcaaatcccggaggtggaggttgcagtgagccaagatggcgccactgcactccagcctgggcaacagagtgaggctctatctcaaaaaagagactgcataacagcggttcctcaaaaagctaagcatagattagcatgtactccagcaattcccttcctaggtaacgacccaagacaatggaaaacacacatccgtgcaattgcgtacatctgtatgcaattgttcatggcagcgtgatttgaaataaccaaatggtgaaaacgacccaaatgtccatcaacagatcaatggatacacgaaatgtggtatctccatgcaattgaatattattcagccctaaaacaaataaagcactggccgggcaccgtggctcacacctgtaatccctacactttgggaggctgaggcatgcagatcacctgaggtcaggagttctagactagcctggccaacatggtgaaaccccaactctattaatcacacaaaattagccaggtgcagtggtgtgcacctgtaatcccagctactcaggaggctgaggcaggagaatggcttgaactcgggaggcggaggttgtggtgagctgagatcacgccactgcactccagcttgggggcaacagagcaagactctgtggaagaagaagaagaagaagaagaaggagaaggagaaggagaaggagaaggagaaggagaaggagaaggagaaggagaaggagaaggagaaggagaaggagaaggagaaggagaaggagaaggagaaggagaaggagaaggagaaggagaaggagaaggagaaggaggagaagaaggagaagaaggagaagaaggagaagaaggagaagaagaaggagaaaagaagaggaagaagaggaagaagaagacaagaagaggaagaggaagaagaaaggaagaaggaaggagaagaagaggaggaggaagaaggagaaggaggaagaagaaggaagaaggtggaggaggaggaggaagaggaggaggaggaaaaacaatgtgggcattgggtacttgcatttggtctacgggaccattagcatcattgatcaactgagggctttttcctagagcaggcataacaaattgatttcatacataagccaacttggatcacctggtgatggctgttggaactggtgtgttgggaagaatcctgagggggcaaatggctaagcaggaaattgactcatgattgactagcaatgtctgccataggcttgggatggggaagaggtgacacgtatgttggcttcaagatcattgagaccatcttccccctcccctcaccaactcattttatagttgagaaaactgaggtccagggtgaccagcaacagatgcagaatccaggtcctggcttcctcagcactcccagcttatccctgacaccttgtccctcctttctccacaggctctgagcccaagtcatgtgtccagccttttgactctggagctgtggcttcagccaccaagagcagcagtggatcctggaaacctgagaacccagacttcttctctgccatgggggatgatcaggcaggtgtctgactgctgaaacgggcaggagctgatgacgacagtggcagcaagtacactttgtttagcacctgcattttaccaggcactttgtgtacattatctcagggaatcctcatcgaaacttgcaaagtcatttattatcctgttttacctatgaggaaaccagaatctgttctgaaataagaagagggaggaaaggagcaatggagggatgaatggatggatggatagatggatgggtgggtgggtgtctggatagatggatggatagatggaaggaaagaggaaatcaaggaaagatgagtagaaggatggatggatggatggatacgtggatgaatagaagggtggctgggtggatgaatggatgacggatgactagaaggaagggaggaaagatgggtagaagtgtgggtgaatggataaatggatgatgggtgaataaaaagaagaaagctagatggatagatggatggactgatggaaggaaggaggatggatgaaggaaggaaggaaagaaggaagtatggatggataggtagaaggatgggtggattaaaggaaggaaggagagatggttgatgaatgaaagagtagaaaggtgggtgaatggaaggaaggaagaaagatgagaaatgtgggtggatggatacatgaatgattgatgaataaaatgaaagatggaaggaaggaagatggatggatgaaaggaaagaggatggataaatgaaagaatgaaggaaggatggatggataatggatgggtgagtggatggatgagaagaaatgtgagtggaaggaaggaaggaagaaagatggatgggtgaaaggaaggaagatggctagattgatgaaaggaaggaggatggataaatgaaagaatgaaggaaggatggatggataatgggtgggtgaatggatggatgagaagaagggtgagtgaaaaggaaggaaaaaaggaagaaaggaaggaagggggatggatggatgggttgatggaaggaaggaggatggataaataaaagaatgaaggaaggatagataaataatgggtgggtgaatggatggatgagtagaagggtgagaggaaggaaggaaggaagatgggtggatgaaaggaaggaggatggataaatgaatgaatgaaggaaagatggatgggtaatggatggatgaatggatggatgagaagaagagtgagtggaaggaaggaagatggataaataaaagaataaaggaaggatggatggataacggatgggtgaatggatagatgagaagacgggtgagtggaaggaaggaaagaaggaaggaagtaaggaagatggatggatgggttgatggaaggaaggaggatggataaatgaaaggatgaaggaaggatggacggataatggaggggtaatggatagatgagaagaaggatgagaggaagaaaggaaggaaggagggaaggaaaggaaggaaggaaggaaggaaggaaggaaggaaggaaggcaggctgactaaaaccaaatacagcctagaaaggtagactgacttgcctaagttcccgtcatggcagagttgggattcaagcccattctgactctgcagcctgcgtccataccctctgctctcatcacactttctctaagcgcttatgtcaggggcctgtggggtaggccagcccccaggctccagtctcaaaagaaagaccctgaaagcttgtggtccctgggtggagttggggcacagttaacatcaagtcctgatggtgtgtggctgggactgaggtcgtggcaaaggtcctggtgacagcctccaggctgcttcagggaaggtctcctggggtggaagatgtggcatctaggaggtgcatccttaagagggtaggggccagggagaggtctcgtaaacatagttcagctccagctccaccagggaccaagacagtcaggtggtgtgtgttgggtctccaggaagcagactcagacggagttgggctgaaatgggcaagcttttatatccccttgtcaatcacccattgctgatgggctgcccaggaagggggctgagaactgacagttccttctcccacagcctcggaggatctgagtggttttccacaacatccgctacactaaggaaggaggatctgttacggttaagccataaagggcatcccatgtacccaggcttgtcattttatggaagaggacactgaggggctgggcatggtggctcgtgcctgtaatcacagcactttgggaggccgaggcgggcagatcacttgaggtcaggagtttgagaccagtctgggcaacatgcccagcacaggccagcctgagcaacggggtgaaaccctgtctctactaaaaatacaaaaattagctgcgcatggaggtgtgcacctgtagtcccaactactcgggagactggggcaagagaatcgcttgaacccaggaggtggggattgcagtgagccaagatcacaccattgcactccagcctgggtgacagaatgaggaaaaaagacactgagatgcaagcagtgaaggaattagtccagatgtcatggaaggtcccgggtaaaggatcacagaaccaggactggagtttagccctgcgccctccctgggatctggacctctttgaaagagaaccatgggatgcaggcagttggacaggtaacacggcaatgggggaacggtgggctctggggaagcaggcaggcctgtgagtaggcagcaaggctgtgcccccacccgctggcaaatctgccccctcttcctgagtctcgattctcatcatccactttgtcttcagagctggagaccagggcattttccttgtcccttcctctcccatcaggcaccaagtcctgtgaattttgaaccccaaggaccctccatttctgtgcattgcaccctccttctccttccctggtggtggtccccgtcatggctcccccaggtaatctgcacgggtgtcctggctgggccacctgcctgcatcttggccccatccaagcccatctctgctctgcaagctgaacacatatgtatttttttttgagacagggtctcactccatcacccaggctggagtgcagtggcacaatctcggctcactgcaacctccacctcccaggttcaagagattcttgtgcctcagcctcctgagtagctgagattacaggcacccaccaccacatccagctaatttttgtatttttagaagagatggggttttgccatgttggccaggctgttctcaaactcctggactcatgtgatccacccgcctcaggcctcctgaagtgctgggattacaggcgtgagccacggcgcccagccagcaagctgaataatctttctgaaggccaatcactgccctccctaccaccactattggaaacttccagattaaatccatgctttggccaaccagactcgtgttccccaacggtccacacctcagccataggaacatttgccatttgcttaaaggcgccatgagctctccagcctgcagacttctggatgtcctgttctttcactgcctgtaatgtgcttacctgcagtatctgcctagccagctcctactcagtcctcagaccttcacttgctgccatttcctccaggaagccctccctgatactttttggagagcgtaatctgttccccctcagatcttccccagcctgctggctggaaccttctatcattcttgactataacggtttggcttaatcatctatcttctccaattagctccatgaggacaggggagactgtgtgattccatttggggttgtcagaggcttgctcagaggaagggtcctgactcctgaaatttatttattttatgtaatttaattatttatttgtagagacggggtcttctctgtcacccaggttggagtgcagtggtgtgatcatagctcactgcaacctctgcctcctgaactcaagcaaccctcccacctcagtttccagagtagctgggactacaggtgcacgccaccacatccggctagttgttttttttttttaaagatgggatttcgctatgctgcccgggctggtctcaaacccctagtctcaactgatcctcctactttaacctcccaaagcactgggattacaggtgtgagccacggccctggccccctgactcctgaaatttaaaaacagcaatatattattctatccgccaaggtttgcattgcccaagcatctcatttcacctgcacaacacaatcctacaagtaggtggcagtatgcccattttagagatggaaaaaactgaggctcagagagctttaggtacttgatcgaggtcatgctaagctaacaacagttaccatagcaggatgcaaaccttgactgaggtctttttacccaatgaccatttgaaaaccatctgccctgtgaggcacggtggctcatgtctgtaattccagcactttgggaggccgaggtgggatggtcactttagcccaggatttcaagaccagcctgggcaacataacaagactctgtctctacaaaaaataaaaaaatactagctggggccgggcgtggtgactcacgcctgtaatcccagcactttgggaggctgaggcaggcagatcacctgaggtcaggagttcgagaccagtctggccaacatggtaaaacccgtctctactaaaaataaaaaaattagccaggtgtggtggtggacacctgtaatcccagctactcgggagactgaggcaggagactcacttgaacccaggaggtggaggttgcagtgagccaagatcgcaccattgcactccagcctaggcaacaagagtgaaactccatctcaaaaaaaaaaaaatatatatatatatacacatatatatattttatatatatatacacatatatatattttatatatatatacacatatatatattttatatatatatatacacatatatatttttatatatatatattttatatatattttttatatatatatattttatatatatatataaaagctgggcatggtagtgcagacctggaaagaaggaagaaaggaaagaaagagagagagagagagagagagagggagggagggagggagggcggaaggaaggaaggaaggaaggaaggagaagactatctgctctatgatttacttgccattttgtttgaaattaagccacttttttacatgacaaaatgggaccagggacacattatgctttggtgtgttatctttttccaacagacaacaagatcaataactatttacatttttaaaataagcatgtattcatgtactatgcaaaactgtgcgtggtgagcctttctgaagagtggggaaccctgggctgtttcacctctggatttgatgggggatcccatcccccaaggctcccccaggtctagggaacaggagcctggatttatagcatcctctttggggtgtcagggccagcagggcagcgtacgatgcttactcagatacctggaaagacccccactgggctggctctcatcttttcttgcccaagatatgtcagaacaaaggtgcaagctccaaaataaaagatgagacaccccctctctccctccctcaatgtacctaccagtgggagctggaacagcctgtactgcctggctccccactccccagctccacccccatctctggcctggctcccacctctgcctcctctgagggaggccagatgcaggagaaagagggaggctcagccaggccaagaggctgtcctgacgtgtttatatttacaggaggatgaaaaccagagacacaaaaaaaccttcgggggctgcgacagaaaagacagtaggaggttttccaggcactgggggtaggaatggagccatttggggggtaagtgggaatttgaaaggaggctgccgcccaagtcacatgagggccagccagagctagagctgtggctctttagaaagagactgaaaaagagggaccctggtgatcaaaaggcagagggaggaagaggacgcagaggaggagtcagcagggagaagggagggaaatgaggacggtggccacaaaggagagattcaagaaggcaggctgtggaaacagcagagtgagtccttaggaagttaaacctaaaattgaccaggcgcggcggctcatgcccgtaatcccagcactttgggaggccgaggcgggtgaatcatgaggtcaggagttcaagagcagcctggccaagatggtgaaaccgtgtctctactaaaaatacaaaattaggcgggtgcagtgactcacgcctgtaatcccagcagtttgggaggctgaggcggatggatcatctgaggtcgggggtttgagaccagcctgggcaacatggagaaaccctatctctactaaaaatacgaaattagctgggcgtggtggcacatgcctgtaatcccagctactcgggaggctgaggcaggagaatcgcttgaacccaggaggcagaggttgcagtgagctgagatcgggccattgcactccagcctaggcaacaagagtgaaactccgtctcaggaaaaaaaagaaaaaaaaaaggaaagaaagaaaggaaagttaaacctaaaattggctgggcacggtggctcatgcccgtaatcccagccctttgggaggctgaggcaggtgaatcatgaggtcaggagttcaagagcagcctggccaagatggtgaaactctgtctctactaaaaatacaaaaattagccgggcattgtggcaggcgcctgtaattccagctacttgggaggctgaggcaggagaattgtttgaacccgggaggcagatgtttcagtgagctgatactatgccattgcattccagcctgggcgacagagtgagactccatctcaaaaaaattaaaagaaagaaagaaagaaagttaaacctaaaattgccatgcaattgtgccactgcactccagcccaggagacagagcgagatgccgtctcaaaaaataaaataaattagtttgggcgcagcggctcacgcttgtaaccccagcactttcggaggctgagcggggaggatcatctgaaatcaggaatttcagaccagcctcggcaacatgatgaaaccgtgtctctactgaaaatagaaaaatcagccgggcatggtggtgcacacctgtaatcccaactactcaggagggtgaggcacgagaatcacttgaacccaggaggcagaggttgcagtgagccgagatggtgccactccactccagcctgggtgacagagcaagactctgtctcaaaaagtaaaaaataggggctgggcgcggtggctcacgcctgtaatcccagcactttgggaggccaaagcgggtggatcacgaggtcaggagatcgagaccatcctggctaacacagggaaactccatctctactaaaaatacaaaaaaattagccgggcgtggtggcgggggcctgtagtcccagctactcgggaggctgaggcaggagaatggcgtgaacccgggaggtggagcttgcagtgagctgagattgcaccactgcactccagcctgggcaacagagtgagactccatctcaaaaaataataaataaataaaataaataaataaatgtaaaaataaaattaccatatgatcccgcaattccacttctgggtatcttcccagaagaactgagagcaaggacccacagatatctgcacactgatgttgatagcagcgttattcacaagagccaacagatggaaagagcccaggtgtctgctgatggatggatgaataaatgcgatgtgatccatccacacaatggaatacaattcaaccttaaaaaggaaggaaattctgacacatgctgcaacgtggaggaatcttgaggacgttatgctcggtgaaataaaccagacacaaaaggataaatactgtctgattccactcgtaggaggtctctggactcgtcgggttcatagatttaccacaccccgctttttttttttctttctttctttctttggagacagggtcttgctttgtcacccaggctggagtgcgatagcatgatcacagctcacttcagctttgacctcccaggttcaagtgatcctcccacctcagcctcccatgtagctgggactacaggagcctcccaccatgcccagctcacttttaaatttttttgtagagatagggtcttgttatgttgtccaggcgggtctcaaactcctgggctcaagcgatcctcccagattgctgggattccaaggcatgagccaccacgccaggcctggtcagattcatggagacagaaagtagaaaggtgggtgccaggggctgggaggggaatgaggaggctgtgtttcatgggaacagaattttaatttgggaagatgagaaagttctggagatagatggaggtgatggttgcacagcaatgggaatgtgcttaatgatactgaactggacactgaaaaatggttaagatgtgggcccgggtacagtggctcacgcctgtaatcccaacactttgggaggctgaggcaggaggatcacttgaagctaggagtttaagaccatcctggccaacattgtgaaaccccgtctctaataaaaaatatataaaaattcaccaggagtggtggcacatgtctgtagccccagcatcttgggaggccgaggcagttgaattgcctgtggtcaggagttcgagaccaacccggccaacattgtgaaacaccatctccactaaaaatacaaaaattagccggacataatggtgggtgcctgtaatcccagctactcaggaggctgaggcagaagaatcacttgaacccgggaggtgaaggttgcagtgagctgagattgtaccactgcactccagcctgggcgacagagcaagactccatctcaaaaaaaaaaaaggttacgatgataaatgttatgtgatgtgtatttcactggaataaaaagaagggaggggccaaatctataaagacatcaacatgggtgagttctgggtaaagggcaaaccctgcgtagctcctccttcctcatcccaagacaagtgtggacactggccccttgcctcctgccggcaaagatccccagctgacaaattgagagcatccaccaagggctgcctgagatcacatggatgcctggagccacatctcagcactggcctcgcatggagccatgggggaagcccactcgcccacctacccaccaaaccctgtgtgcagacagtcctaacaaatgcctggaaaaggacaattcctgtcctgcagatcctgacagcccagaggaagggcaccttaccaaccttgaggagtcaggaaggcaacctggagggcatgcccaagctgggttttgacggttgcataggagttcaccagacagactcaggatgggccgggtgggagaggaggttttgcaagaagaaaaggcaggtgccctggctggacagaatgacaaatacaatgactgggaggagaagagggaagtgaaggacaaaagaagggaaggacaaagaaataggaacaggagcagaaactgtaccaaaaagaaaaaaaaaaagagagagagataatcagatggaaactcagtgacgagaagtgctttgccaaggctagaagtaggggaatctggcatggaagaccagacttctggtccttttgtgggggtgagctcttgaaggtccaggttagacaggggactgggggactactccctcccattccatcccacccgctgtgaggagggcgctgagcccaggagggacaggtaggggacaggcagggtctggatgttgggagcagggaccttgtggtcaagagaccccaggttctgctgccccttggtcaatgtcttcttctccctcctcaccttcccaacctacaggaggatgattttcccaggcggctcagcgagagtatggaggacctcagcctggatttgggggcccttcagggcagcgagtatctgcaggacctgggccttggggccccttcccacagccagcctggggagaccccagacagccgccccaccggtgaagaaccaggaagagattctcttttctccagcttggcagggtcccaagacctgtcaaggcggcgcagctgggaaaggtcgcggagctgctcagagagctggcggaggtcagttccccactgctgcctgcttcccacaatgcacccctgggacagggaagaggtccagaaggccagagccaggtcctaagacaagccaccccttgcacctgccgtggtccccaacctttttggtaccagggaccagtttcatggaagacaatttttccatggacccagggggacaggggatactttctggacaattcaagcacattccatttatcgtgcactttatttatattacgttgtaatacataatgaaataattatacaattcatcatcatgtagaatcagtgggagccccgagcttgttttcctgcactagacagtccattctgggggtgatgggagacagtgacagatcatcaggcactagattctcttgtttttgtgtttgtttttttttttttgtttttgttttttttttgagatggagtctcactccattgcccaggctggagtgcagtggcgtgatctcggctcactgcaatctccgcctcctgggttcaagcgattctcctgcctcagcctcccgagtagctgggattacaggcacgcaccaccacacccggctaatgtttgtatttttagtagagacggggtttcaccatgttggtcaggctggtctcgaactcctgacttcatgatctgcctgcctcagcctcccaaagtgctgggattacaggtgtgagccaccgcacccagcctagattctcataaggagtgtgcaacctagatccctcgcatgtgccgttcacaatacagttcccgctcctatgagaatttttttttttttttttttgagacagaatctcactctgttgcccaggctacaggctcacaccaccacacccggctaattttttgtatttttagtagagatggagttttaccatgttggccagactagtctcaaactcctgacctcaggagatcctcccgccttggcctcccaagtgctgacatgacaggcatgagtcaccatgccgggcccctgctcctttgataatctaatgctgccactcatatgacaggaggtggagctcaggcagtcatgtgagcaatggggagtggctgtaaatacagatgaagcttcgctcacatgcctgcgctcaccttctgctttgcagcccggattctaaaaggtcacagactagtaccagtctgtggcccaggagttggggatccctgctctagggccatgaggggcgtctgcaccatcagaggcagcccaaaaaaccctcttctaacttgcacatgcatgaacatagagcctgtgcaagtgaccgagcatgcatgcacaagcccaaactgaaaactgcatgtgaggccgggcgcggtggctcacacctataatcccagcactttgggaggccaaggcgggtggatcacctgaggtcaggagtttaagaccagccatggtcaacatggcaaaaccccctgtctactaaaaatacaaaaattagccaggtgtggtagtgcacacctgtagtcccagctactcggtaggctgaggcccgagaatcgcttgaacccaggagacagaggttgcagtgagccaagtttatgccactgcactccagcctgggcgacagagcgagactctgtctcaaaaaaaaaggaagaaaaaaaaatcgactgcatgcacacactgcaagcacacaaaaacctaaatttacacacctgctgagagtacggccacgatcagcacccatcagacccacgcatataagcttaaacgtgatctgcatactgcttgcatgcatacgcatgaagccaccatgcagttatgatcagaacggaaatgtgtgagacaccatgcaccccacagtggcagcaccaaatagtagaggcagggggtgctctagccacccctaacccgtgtccctcaaccccttccaagtcatcccacatagaaattcaggccgggtgcagtggctcacgcctgtaatcccagcactttgggaggcagagtcgggcggatcacttgaggtgaggagttcgagatcagcctggctaatgtggtgaaaccctgtctgtactaaaaatacaaaaattagctgggcatggtggcacgtgcctgtaatcccagctatttgggaggctgagggaggagaatcgtttgaacctgggaggcggaggttgcagtgagctgcgatcgtgccactgcactccagcctgggtgacagagtgagactctgtctcaaaaaaaaaaaaagaaagaaaagaaagaaagaaaagaaagaaaaagaaagaaagaaagaaaaggaagaaagaaaaagaaagaaaaggaaggaaggaaggaaggaagaaagaaaaggaaggaaggaagaaaggaaggaagaaaaggaaggaagaaaggaaggaagaaaagaaaagaaagaaaagaaagagaaaaccagtctgtgcaaaaacgatctgagatgcaaatgtagctccaacaaatctaaccaggctggctttctttgtcctctcccccttgccacccactcctctcatattgggaggtctggacccctttctgtggcttgcgcacccttccttgtcctggaagggcccccttgcatgttctttcaagcccccctggatgcctggggcagcagccaggtgggcaagacctgctgaagccccagtaccctgtcttctccactaggctcagcctcgatgcctcagctgtggatgaggaaccctgtctcccccgaacactggccagccttgctttgaacctgccaggaggagggctgaagacctggactcaagggtgtctctctgggggcgggacccccgcagagagcccaggcaaggtgggtataacctgcagccacccctgacaatagcacacttttgggtttagaaagcagtgctataggtaggaaggagagacttgccagggctggtggcgcttacccaccatggcagggtggaggctgcttatctgtggtgtggcccgtgcctcagttgtctctgggtcctaggattccagcctaggcctgaagggatttccctgggtaagcatctggggcaggccatgcatggccatgactccaacccaagggctggagacaaggggatgggggatgtcttatcttgcagtttcagccaggcttggaggatctttgcctggagtgtagccctgcagccggaaggcagctgtgtctgtggttggggtatgcagctacagctaaggagaatttgtgtctgacctgagatcccagctcacacctgaggaatgcatgcttggagctgtggctggtggctgagacatctttggctgtgatcacaaaggaccctgggggaaattcctggccattgttggaagctgtggctctgatacctggggctccagctcagagctggaggctcctccgccaggactacagccctgtggctggggagggggtggctgaacccatgtcttatggctggggggagtggctggaggctgaggcttggatgagtgtgtcaccccatttctgtggaggtggccctggctgtgggttgggcccctcaatccagggaacctgcctgcagtccaggctgccttcccagcttagtgagatgtttaatcccctgcaggaatgtgacagccccaagaaaagagggaggtcaaggtccgttcctgtgtccttctatgagatccgctctccggaaatctctccgggtttggaagtgcccactccacctgttcaaggtagccagcctgggagtttccttcattcaaaccaagtcagggaaagaggagcctggccaacatggtgaaaccctgttggggtttcatccttcatcctggagggtccccttggtggggctccagatgggccccagggaagggaagggagctggcttagggtcccctgggcagggactgagcagaacgctgggggaagccagagaggggaagggacctccagcatctgtccctcctcctctccctgcagctcttgagccagtgtgagattgccccattgcaatgagcttgtccccaagattctctcttctctctatgactcttttttttttttgagatagagtcttgctctgtcgcccaggctgcagtgcagtggtgcaatctcagttcactgcaacctccgcctcccgggttcatgcccttctccggcctcagcctcccaagtagctgggactacaagcacccgctaccatgcccggctaatttttgtatttttagtagacacagggtttcgccatgttggccaggctggtctcaaagtcctggcctctagtgatcggcccgcctcaacctcccaaagttctgagattacaggcatgaaccaccgcgcccagcattctgactatttctttatctctttctttatctctgaatttttatcctgagatcttgcacctctctggcatcagacaaacctggagtctaaacacataacaagtctctgagcctctgtggcttcctctattagaacaggtgcagcagctcacacctggaatcccagcaccttgggaggctgaggcaggtgaataacttgagcccaggagtttgaggccagcctgggcaacatggcgaaaccttgtctctactaaaaatacaaaaaacaattagccaggcatgacggtgtgcacctgtagtcccagctactttggaggctgagatgggaggatcacttaaacccaggaggtcaaggctgcagtgagttctgatggcaggactgcgctccgctctgggtgacagagtgaaaccgtctcaaaaaaaaaaaaaaaaaggcctggtgcggtggctcacgcctgtaatcctagcactttgggaggccgaggcaggtggatcacctgaggtccagagttcgagaccaccctggccaacatggtgaaaccccgtctctactaaaaatataaaaacgcaagaattagtcgggcatggtggtgtgcgcctgtaatcccagctactcgggaggctgagacaggagacttgcttgaacccaggaggcggaggttgcagtgagctgagattgagccattgcactccagccagggtgacagagcgagactgtgtctaaggaaaaaaaggggaggggggacaataagcgtatctccttcaggccacttggagagtctgctgatctcacacacgtaaagcacttagtaggttgtaagcactcacgagacactggggacacctgcgtttgtccctggctctctgtcctcttctcgtctctgttgcctgagagtacaggccctgtctgcatggcctccagttctgcaggggcccagggtggcatccgggagggctctgctgggctggtcctgtcccagagctcctgacaactgtgcttcctgggatggggggcttcttccaggcctggaacctccagtgctggagtgcatggaaaaagaccatgtggaaccagatcacgtgtgagtttctgcctcgtggtgggggagggacccccagggaacaggccacaaagtcagggctgcgggaggagggctgccagggtgcagtgttgctggccataagtgaccagggccagacaccatcccactagtccccccataacctcatctttctgccaccatccttctcccggtgggagggacccaggcccctcagaaaggttctcaatgtagccttgggagacaattgtggcttttttttttttttttttttttttttgagatagggtctcactctgtcacccaggctggagtacagtggcgtgatctcagctcactgcagcctctgccccctgggttcaagtgattctcctgcctcagcctccagagtaactgggactacaggcgcccgccaccacgcccggctaatttttgtatttctagtacagacggggtttcaccatgttggccaggctggtctcgaacccctgacctcaggtgatccgcccaccttggcctcccaaagtactgggattacaggcgtgagccactgtgcccggctgactgtggctttgagtagggtctgcatcaggacctgaggcctgcttgggcaaccccagcttatctaggggagagtgtctgtaacctggagctaccatgggctgttctaatcccacctccacccccacaggctgattgtccagcaggtgcttcaagaacttcgacagtaccatgggtaagtgggaatcgggacaggcttgaggggagcaaagtgggagacaaaagcaggaagcatgcaggggtgtgcacaggtgtaggagacaggggtagagaagactgggtgagggctgggtacagtggctcacgcctgtaatcccagcactttgggaggctgaggcaggcagatcacctgaggtcaggagttcgagaccagcctggccaacatggcgaaacctcgtctctactcaaaatacaaaaattagccaggcgtggtggcacgcacctgtaatcccagctactcaggaggctgaggcaggagaattgattgaacccaggagttggaggttgcagtgagctgagactgcaccattgtactccagcctgggcaacacagtgaaactctgtctcaaaaaaatagaaaaaagacaaggctgggttcaagggaagaaaaatggggcagaagaggagggaggaggatagaagacaagagttggagaggagcaggctgccactggcataggggttccttggagcaaacaggtgaaggtgcctcctgcctaagacactgccatctgttacaaaatcttcctgtagctggatgtggtggctcataccactgtaatcccaacactttgggaggccaaggtgagaggatcatttggaggccacgagtttgagaccagcttgggaaagatagtgagaccctgtctctacaaaaaacatttaaaaatttgctgggcgaggtggctcatgcctatgatcccagcaatttgggaggctgaggtgggaggattgtttgagcccaggagtttgagaccagcctgggcaacagagtgagactctgtctgtataattttttttttttgattagctgggcgtggtggcacatacctgtagtccccagctactctggggggtgtgggggtgttgacgcaggaggatggctgagtccaggcagtgaaggctgccatgagccatgattatgccactgcacaccagcctgagcaacagagcaaaaccctgtttaaaaaaaaaaaaaaattgtgggctgggcgcagtggctcacacctgtaatcccagcactttgggaggccaaggcgggcggatcacgaggtcaggagatcgagaccatcctgactaacatggtgaaaccccgtctctactaaaaaatacaaaaaattagctgggcatggtggcaggcgcctgtagtcccagctactcaggaggctgaggcaggagaatggcgtgaacccaggaggcggagcttgcagtgagccgagatcgcaccaccacactccagcctgggtgacagagcgagactccatctcaaaaaaaaaaaaaactgtgtaagatttaagtacttggttaaaaaaaaaattaaaaattagccaggcatggtggcacatgcctatagtcccagctactcaggagactgaggcgggaggattgctcaagccccggaggtcgaggctgcagtgagctgtgattgtaccactgcactccagcctgggcaacagagggagacgccatctctattaaaaaagaaaaaaaacatcttcctgctacactgattttgtttagccaagacacattactgccctctgctggaaaacctgtcataatgtctcatatacaagcccagagtgtcaaggacaggtgggctcttagacggggtacctggtgtatgcctgtactcggtagcactggggtaggtgagtgggagaagaggctgccgacccaggtatctgtcccctctgatcctgcagggcccggcagagggcttgcatgtcagccagccccggaggagcccactcgaacctgacctggtttgaattcctgtcggagtaagtacacagatctgcttctggggagggcagccttggattcgaacaagtgtttacagatggtcctttgggccagaccccccatgctgggggcaggagctggagcccccatcagggcaatggtgggagctggcaggaaagggagggatgaggctcccgtataccctgagaggacagaggaagacttcctggaggaggtgacgatgtaagcagggttctgacggaagagtaggagtttgccaatacgtgcagataaggatgaaggaaaaaaaaagaaactagaaggcttagggaatgacatcggagtggggctgggaggagggaaggtgggagaaatcagcagagaccagaccacctcagctacacaaaggcgctcacactttatccgaaacagcagtggggcttgggtgcggtggctcacgcctataatcccagcactttgggaggccgaggagggtggatcatctgaggtcaggagttcaagaccagcctggccaacatggtgaaacccaatctctactaaaaatacaaaaattagccggatgtggtggcgggtgcctgtaatcccagctactcacgaggctgaggcaggacaatcacttgaacccaggaggcggaggttgcagtgagccaagatcacgcccttgcactccagcctgggcaacagagtgaaactccgtctcaaaaataaataaataataaataaataaataaataaataaataaataaaaataaaaagagcagtggggcctttgagcattatcagttctggtgataggatggggacagtatgaggaccacagacagggctggaggtccctgaatccctctctctccctcctttcctccctccctctctcactcactcattcattcaagaaacatttatggatatttacaaagttccagaagccactcggactgggatctgggggcacagactggaggaatggcgtctccgcccaggaaatagaccctaccagagcaggaatcatgtctgccttatatgtcactgacctaatatttattaaatgaaggtgtgcctgaaatccaggaaaccatgccagtgacctggggatggagtttggggtgggggaggagatagaagaatgagcaggatttaaagaccaattagggccgggcgtggtggctcatgcctgtaatcccagcattttgggaagctgaggcagatggatcacctaagcctggccaacacggtgaaaccccacctctactaaaaatacaaaacaattagctgggcacagtggcacacacctgtggtcccagctactcgggaggctgaggcatgagaatcgcttgaacctggaggcagaggctgcagtgagccgagattgcaccactgcactccagcctgggtgacagagtgagactctgtctcaaaataaataacaaaataactaaataaataaataaataaaggccaattagataccgggtgggggtggggggcgtgaattagagggagaaatcataagtgaacagagctgaaattcccagcccaggcattgagggacctcaaacctgagatcacgttgcatttccctctgtaaacccagtccccaaagctcttgcaaacattcattcatgtctgctgagtgaataagtaagacagggaaggagggagggaaggaggaagtcaagggccagggaaggggtaaggcaggaccaggaggccacagggagacaggttgcaggtggattcctgaagcaacccacagggctgcctcagaatggcccctggccccctctagtggaccttccctctcgtccctcaggagcgaggacggtgctggcaagaacgagaagagtgacaagagtaccagtgtgaagcgcaggctgagctgcctccgcagtcgagtgaccaggcagaaggagaaggtaaggggagctaagccacgggggccctcctctgccttccccagcttggcttgctgcccttagcccgggagccctgtgactggggctggtggtgggctgggtacacagtatataagagggccagtgcctgcagagggcatcctgagacccacctctgtcccatccaggggaagagcccagcacatctgaaggacaagggccaggatgcacgagagaggcgggagtgtgtcaatgggcaccagctgttgcaagggaccttctccggcccctccagctgccccctgtgtggcaaacctttcttgagctcaggtaagtctggtggcccaatccatcctcctggagggcagccactttctcttcttcacgtcctttcaatcatactcctggggtctcttttgatgtgtgcatcctcgttctgttttgccctctcctcggcggctccctggagagaaccagggatcagtccctgggcacagggacccttgggctaactcgggactggcaacagtccctttaagtctcagcttttgcgattgtgggaatcctcctgcagcatctggacttgagccgtgtatgagtttgctagggctgtcatgacaaagtaccatgcaccaggtggcttaaccatcagagatatattcccttgcacttctgggggcttaaagtctgagatcaagggctaagcttcatatgaaggtgccaggaaatgatccattccaggcgtctctcctggcttcatcccttagcctcacatggccctgtctgtgtcccagtttcccctttctataaggataccagccatattggattaggggcccaccacactccagtgtggcctcagcttagcttatttacatccatgaagactctattttcaaataaggtcgcatcctaaaggacagaagtgggggagtaggattgcaacacatgaatttgatgggtggggggaggggcatacaattttatccatagcaggtcgttttctgcttcctggggcacttggtggttgtggggtggtgagggaaagagtctctactcgagaaaaagtaccagattcaagagactcccagaaagagatggctctggtcattgccgggatttagaactttgtctttttgcaaataagctccacgttggagggaatgaagaggaggaggtggtggcaactgcgtgttagaaaagatgcgtgcgccgtttgtaaccgaatccaaactgcagtctgtggctggcagaactcaggctagttcacagtttctgggccttagcactgtcaacatttggggccaggtgattctttgttctaaggggctatcctgtgcattgtaggatatttagtagcatccctggccttcaccctctaaatgctggtagtaaccacctcctgcctccagttgcaacaatcaaaaatgtctccagacatggccaaaagtctcctggggggcagaatttcctccagacaggaatcaatgggtgaatgagatgggcaaacagatcctagatgggcttagaccctgcagtgagagaacatctccacccccggggcaagtgcctctgagcaacgtgccttgcaggttttgcatttgttggctttacctgcttcaggcgtgggaattttccttctttctcattttcctctctttctgcagtgccattgctggccatggggctgggggtggctgttggtggctagtggtgtcaacgatgttcctctttgagctccctctgttaggcaatccccatccagctctgtgacccatgagctgtcctcagcagaggctggcatgagctttttgcaaaatttttttttttttttttgcgacagggtctcactctgttgcccaggctggagtgcaatggtgtgatctcagcatactgtagcctctttctcctgggctcaagcaatcctcccacctcctcctcccgagtagctgggtctacaggtgtgcaccaccatgcttggctaagttattaacttatttttgtagagacaaggtctcactatattgcccaggctgctttcaaactcctggactcaagcgatcctcccgcctcagcctcccaaagtgctggaattataggtgtgagccacctcacccagcctttgccaaatcttcagtgcaccaacaaagtcagtgtgttgaagtccttaatttgggacagcaggtgactccctcttttccctggcaccttgttctcttctgcaggggatgagctgtgctcagtctatcttaggcatcagatgcaaggggcagatagaaggttggaagttggaagagtaaagccagaggtctagaaccaagactgcacagagcaggcgctgggagcctgccctcggatacccttccttgaacagctccaggctgagctgaaccatgcacttccttctgtgattgctggttccttatcattctccatttgtttctgttcctgcttttgctttgcttctcagaaaaatcctgaggtctttaaactctgatttggggtcacccaaggtcttgtatgtccatgtggcccactgacttagagcgtcgccgtcatctgggaacttcattattattattattattattattattattattattattattattattttgagacggagtcccactctgtcacccaggctggagtgcagtggcacgatcatagctcactgcaactctcacctcccaggttcaagcgattctcctgccccagcctcccgagtagcggggattacaggtgcccaccaccacgcccagctaatttttgtatttttagtagaaacagggtttcaccatgttggccaggctggtcttaaactcctgacctcaagtgatttgcctgccttggcctcccaaagtgctgggattacaggcgtgagccaccgcgcctggcctgtcacctgggaactttttcaaaatttctattttagagataggatctatctctctctatctctctctctctctctctctctctctctctctctctcccccctccctctctccctccctccctctctctctccctctctccctctctctctctctctctctccccctctccctctctctctctccctccccctctctccctctctccctctctctctctctccctctctctttctctctctctccctctccctctctccctctctctctctcctccccgccacccccggggctggagtgcagtggtgtgatcataactcactgcagccttgaaatcctcggcttaaggaatcctcccacctcagcctcacaaatacctgggaccacatgcatatataaccacaccctgctcatttttaacattttcgtttgtttgtagagacgggctcttgctatgttgcaaaaaaaaaaaaaaaaagacaaaggaaaaacatgaagttagaaaaggagacagagtgattacagagtttgtcaacctcagcactactgacatttggggctgtggtgtggggccgccctgtgcctgggaggaggttgaaaagcatccatcgtcttcacccacttggtggcaggagcgcctctagctatgatgaccaagttgccacgtgtcctctagtggcagggtaggaatgcagtcacccccaggtgaggaccacggctctccctcaagtgtccagggatagcctctccgaattggtgacattggaatccagatgtggaggaggtgggaaaagggccctgtggataggtagggaagagtattccaggtcgtaggtggaaaggtcccagggcaggaatgtgccccgggcagcagaaaggccagtgtgcttgaagtggaggtagaagaggtctgtcggaacctgttgcaggtcacacaaatgtgcatgcctgcccccatctgagccattgctcagaggaccctgtcacttgtcactcgatagctgagcttgctgtctgcaaatcccacctccacctagactcctatcagggcagacaggcttcagtggcccctgtgtgagcctggaagttcccattgctgcttcggatcccttctccactctgggcgctgcaaagacagttcctgccttccagctggggatttgggcgggacagcgtccagcacctccttatgagctttcagtccccctgaagttgtatgccacatctgctgtgtccctgcgtttttctggaggagcagagcagctagggttttcatcagatctccaaccagaacatgcgaccttggaaaagttcggcaacaattttctaagccagggactggcaaactgcagtccatcacctgtttttgttgttgttgttgtttgtttgtttgttttgagatggagtctcactctgttgcccaggctggagtacggtggcgcgatctcagctcactgcaagctctgccttcctggttcatgccattctcctgcctcagccttccaagtagctgggactacaggtgcccgccaccatgcccggctaattttttgtatttttagtagagacggggtttcaccgtgttaaccaggataatctcgatctcctgacctcgtgatctgcccgtctcggtctcccaaagtgctgggattataggcgtgagccaccgcgcccagcgctgttttttgttttttgagtttttttgtttgtttgcatacgctgaaagctaagaatggggtgggttttttacatttgtaaatggttgaaaacaaatatttggtgacacacaaccattctatgaaatttgcattttacagtctgcaaataaggttttgtggcaggacagctcgcctgttcatttatgtatcaccttcggtggttcccaagctacatctttgcttttggttttgttctgagacagaatctcgctctgtcgcccacgccagagtgcagtggcgtgatgtcggctcactggagactccgcctcccaggttcaagcgattctcacgcctcagcctcccgagtggctgggattacaggtacctgccaccatgcctggctaattttttttagtagagacggggtttcaccatgttagccaggctggtctcaaactcctgacctcaagtgatacacccacctcagcctcccaaagtgctgagattataggcatgagccaccgtgtctggctcaagctacatttctggttggcagagttgagtttgcagcattacaaagcaagtttgccaacccctgaacgaggttatctggtagcaagcaaggtgagtggcttatcatgtcctgcaaatcaataaaccccttacaaaaaaatgaccttgagcaatgagagttccaacagcgtctaatttcctgaatgtcactttataatcacagaaaactttgcacaaataataacaatggttagcattaccgtatggagcacttacactatcccaagcactgtaagtgctttattttgtttttatttagattttttaaaaatagagacaaggtcttgctatgttgtccaggctggtctcgaactcctggcctcaggtgatcctcccacctatgcctcccaaagtgctgggattactggtatgaactactgagcccggtctgtaagtgctctaaaccgatttcctcattcagctttgtaactctgtagacactagcactttctctctttcacagatgaggaaactgaggcccagagaagttaagtttttgctcaagtcagggtttgaactcacagcctgagcccccgatcaccaatccattggcatatgatgcccttttatttttatttttatttatttattttcagatggagttttgctctgtcacccaggctggagagcagttggcaccatcccagctcactgcaacctccgcctcccaggttcaagccattctcctgcctcagcctcctgagtagctgggattgcaggcatgcgccaccacgcctggctaatttttgtatttttagtagagatggggtttcaccatgttggccaggctggtctcaaactcctgacctcaggtgatccacccccctcagccttccaaaatgctaggattacaggcatgagccaccgcgcctggcctgccctttgatttttaaaaaatatacttttaattttatatttacaggaaagtacaaagaaagcagagagagtccctttaagccctccttcccagcttctcctcatgttatttttaatttttttgagacagagtctcactctgttgcccaggctggagtgcggtggcacgatcacagcttactgcagcctcgacttcttgggctcaagagatcctcccacttcagcctcccgagtagcagggactacagtctcgtagcaccacaccaggctaattttttttttttttttgagacagagtctcgctctgttgcccaggctggggtgcagtggcgtgatcttggttcactacaacctctgcctcctgggctcaagcaatcctcccaccctagcctcccaagtagctgggactagaagtgcatgccatcataccaggataatttttttttttttttttttttttgtagaaacagggttttgtcacattgcccaagttggtcttgaactcctgggctcaagcgatccacccacctcagcctcccaaagtgctgggattacaggtgtgagccactgcatccaccctacattttcttccttccttccttccttcttccttcctcccttccttccttccttcctttctttctttcttatttacttatttttttttttttgagatggagtcttgctgtgtcacccaggctggagtgcagtggcacaatcttggctcactgcaacctccacctcctgggttcaagctactctcctgtctcagcctcccgagtagctgggattacaggcgtatgccaccatgcctggctaattttttgtatttttagtagagacagggtttcgccgtgttggccaggctggtctcgaactcctggcctcaagcgatccgcccacgagtcgtgacatccagcccactctcagggtggtgggaattaagctctttctcctggagacatcatttgattttgatttgcaggacaaccctttgaggtcaagaaagatttgagtttgtgtgaaagaaatgatgtggggccgggcgcggaagctcactcctgtaatctcagcgctttgggaggctgaggcaggaggatcccttgagttcaggagtctgggcaatatagtgagaccctcgtctctacaaaaaaaatgtttaaaagttagccaggtgtggtggcactcgcctataatcctagctactcgggaggctgaggtggcagcattgcttgagcccaggtgttcaaagctacagttagctatgatttgccactgccctctagcctgtgccacagagcaagaccctgttcctaaaaagaaaaaagaaataatgtgggtaaaggctgggcgtggtggcttacacctgtaatcccagcactttgggagaccaaggtgggaggatcacttgaggtcaggagtttgagaccagcctggccaacatggtaagaccccatctccattaaaaacacaaaacaattagcggggcatggtggcacatgcctgtaatcgcagttactcaggaggctcaggtgggaggatcccttgaacccaagaggtggaggttgcagtgaggcaagattgcgccactgcacttcagcctgggtgacagagcgagactctgtatcaaaaaaaaaaaaaaaagaaaaaagaaaagaaaagaaaagaaagaaaaatgatgtgggtagcactcacttagcatgatgtctggtacacacgggcaatggtatcttgtatcatcatcatcatcctcttcattttttgttattgtcatttaaagtctttcagccagtaagcggcaaagctagcatttaaatcatagacgcttgcctctgcaaagctgcaaaaacaaataaaaataataataaatcacagaccaagccaggtgtggtggcttacgcctgtaatcctagcactttgggaggccgaggagggaagatcacgaggtcaagagagggagaccatcctggccaacatggtgaaacaccgtctctactaaaaatacaaaaattagctgggtgtggtggcgcctgcctgtagtcccagctacttgggagactgaggcaggagaatcacttgaacccgggaagcagaggttgcagtgagctgagatcacaccactgcactccagcccgttgacagagtgagactctgtctcaaaaaaataaataaataaaataaaaataaaaaaataaatcacagaccctaaccctgttctctgacaacaaacccctccccacctgtgtcaggaggcatgaaggggccaaaacacccatgtctcattcccagcaggctgagaaaagtcctcccaaggtataactccccacaggcctacctgcttttaaaggtattcaaagtcaacgtgacagtctgtcccgtttcctcccgtccgtgggacagacggaggaaacagcctcacagtaagttaaacaaacagaacagagaatgagtcatactccaggtaattagagaaggtgggtctccacgataaagttgggatgcttttcagagaacagacaccacgccagacagtcctgttcctggccttgacctttgaggctgtttataattcaaccccacctatccctccacgcttctctcccactactcaggttctccggactccacggcccagtcaccctgaagtctcatggctgttcatacacgtcatacacatacgctgtgccttgctcatccagcgctgttcctggaactccctctcccacctaactcttactcatccttttaagacaaagcccaggcccacttcctccaggaagtcggaattaggctggataagtgtctgaatgtctcttaggccagttgctctcagccaaggaaacatctggaggcatttttttcaggaccaggggagccactggcatctaggaggtagagaccagggatgccgctcaacaccctccagtgcataggagaccacccctgccaccaccaccgagaattatccagccctaattgtcgaaagtgccaagctgagaaaaccctgctctgggcctaagctccttgcatctccttagctcctagcgcccctggtccatgctaaagactcataaatgaggccaggtgtggtggctcacgcctgtaatcccagcactttgggaggctgaggcaggcagatcacctaaggtcaggagttcaagaccagcctggccaacatggtaaaaccccatctctacaaaaaatacaaaaattagccagatgtagtggcgggtgcctgcaatcccagctactcgggaggctgaggcaggagaattgcttcaatctgggaggtggagtttgcagtgagccaagatggcaccactgcactccagcttgggcaacagagtgagactccgtctcaaaaaaaaaaaaaaaaaaaaagactcataaatgcagaatggttggatggataaaagaaagatgggagatgtttctccttcctagttgtctctgagaaagttggtttctatgtttaggggagggctgtgtccacctgaagtttcctataaccaagatagctatagaaataaggctgatggccagacccagtggctcacgcctgtaatcccagcactttgggaggccagggtgggaggatcacttgaggtcaggagttcaagaccagtctggccaacatggtgaaaccctgactctactgaaaaaaaaacaaaaaaaaaacacaaaaattagccaggcttggtggtgcatacctgtaattccagcactcgggaggctgaggcaggaggatcacttgaacccaggaggtggaggctgcagtgagcctagatggtaccactacactgcagcctgggtgacagagtgagactctgtctcaagaaagaaaaaaaaaaaaaaagaaagaaaaagagaaagaaagaaataaggttcaaaggccgggcatgatggctcacacctacaatcctggcatcataggaggcccaggcgggcagatcacttgagctcaggagttcgagaccaatctaggcaacatggcgaaactctgtctctacaaaaaaattagccagacgtggtggtgtgtgcctgtggtcccagctacttgggaggctgaggtgggaggacaacttgagcccaggagatggaagctgcaatgagctatgattgtgccactgcacttccagcctaagtgacagagtgagatcctgtctcaaaaaaaaaaaaaaaaaaaaaaaaaggaaaaaaaataaggttcatgcccctaagtccataagccacagctacacagctgcccaaccattgagccctcataaactcccgtgttagagtttctgacctcagctgcagtagggtgcctggtgaattacgtcttgcatttctgggacatccaattccctgaacatgctcccttcctctggaccatgaaggttggacttgaactgaaggctagtccacctggggacgcaaccctccagcttctgaactggggactctcaacaacatattgtgcatgttttgaagtgattgggtttggggaaatctttttttctaaaatagagactgggtcatgcgaggtttcccaggctgatctcaaagctcctggactcaagtgatcctccctcctcagactcccaaagtgttaggattacaggcatgagccgtcttgcctggccatggggagatcttctaggcctggctgaccagccaaccttggtgagagctgttctgctcgactcctggttactgttcaactgcctcccctgtggcaggacttggattagacaggcaacctcaagactggggtgtctgatggcaattgagaggttgctggtgctgggggaagcatctggcctatccacatctgccaaatagcacctgtgtggaagtggataggggagggtatggtatgtgtttcagactctgagcacctgtttgagggtatctgacagcatctgtattggggttatctagtatgtgtttgggggtatctgctggacctatgtggagtgtctgacatatttgggggttacctggaagcctgttttgggtatctgatggcacctgcctgggtgcctgtgtttaggggatctgatggtatctatgttggggtgtctgagaccactggagaggtatatgattcatttttcccagacccacctttctgaagtctatgctgcctctttttttgttgttgttattttgagacagagtcttgctctgttgtccaggctggagtgcagtggcatgattatagctcactgcagcctggacctcccaggctcaagtcatcctcccacctcagcctctggaggcatgatcatagctcaccgcagcctggacctcccaggctcaagtcatcctcccacctcagcctctggaggagttgggaccacaggcaggcgcctccatgccctgctcattttaaaaaatgttttgtagagatggggtcttgctatgttgcccagactggtggtcctgaactcctgggatgaagtgatccccccaccactccctgatgctgcttcttttttctcaggtgacagaccctgccctctccatttcttggactctccccgctaggactccccaccactgggagtgccccccttaggtacttccaatcctaacgagcccgtaggagcccactgacaacccctccaggcatccgttgattcttccaaaacacccccagctccactgtcctcccttggggtccccttaaccccgctatcctccctcggggtcccccaactccgctgtcctccctcggggtccccccaaccccgctgtcctcccttggggtcccccaaccccgctgtcctccctcagggtccccctaactgtgctgtaccccccttgagattctccaaaccgctgtcctcctcaggactccctccccagccgcgctaatcacccaggcttccgttaaccccacaaaacgcccacctaaccctgctgctctccctctggatccccgcaacccagctgtcccctcagagcccccggccctactgacagccaggctcgcattgctctccttcaaaaagccccccaaccccgctgacccgcccctcaaaagtcgccctcaccctcgccgcgagcaccctcccacttcggtgcccgcgcccctctcaaggccgagccgacgccccctcaccacggctcggggagcagcagccccaggtccccgggagcgccccgccctcgagggcacgcctccttccgggtcacgccctctgccccgcctccgaggcgggatcgcgcatgcgctgctctcctcgcgcggcttcccgcttccggctcccagctgctagctactgtggatctgggggggccggacggaggcatcggaggcggctgcgagagtggcagaggagctggcggagagcggcctgcgggcgatcgggccgaggtgaggacggcggcggggcggtcccgaggaaaacggggctcaggagggggccctcggtctcttcagggggtggcctggggcgcgggacccccggggctgcctcgggcctcccgccggctcctgggggacttctccaggcaggcgaacgggtgctggggtgcaggctgctccttcaatgcatggaggctctaggcggcgattgcagggtgcagaggtgcagacgatgcccgcccgctccgtccgagccccagccagtcctggggtgctacggcttactctcctccaggagaggagaggaggggtcacttgggccccagcctctgctcctcgttcaggagcgcccggggcaggaccagggatggaatggaacccaccacaatacccagcaccgtcgtatttcaggcctcccgggagaaccctcacaccccggagcagacagccctccctggcagggagcgtttgggtgcaaaaccgtgagaactatctgtgccatgggttttagtttcttgtataagaactcagttggtgctttcattgcggacgggaacgagaagctttcccctggtccttacatgtttcgttttgttttacgtttttaaatttcaacttttatttgagattgagggggtacatgtacaggtttgttacctggatatattgcgtgatgctgaggtttggggtgtgactgatctcgtcacccaggtactgagcatagtactcaatagatagtttcaacccttgacctcctccttcccttcccgctctagtagagcccagtttctgttgtcttcttggtgtccatgagtacccaaggtttagctccacttacaagtgggaaagtgcagtatttggttttcttttcctgcgttaattctactagcacttgagtgttttgctgtggctatctgccccttatctcttgctctgttgagattaaagcctggaccacaggattaaaaaacattcttaaagttttaccacggaagcgaagcggccaacacaccttttcccctttgccttgttttcgcggagatgaagctccagccagtagctttgaagggccccattctcttcccattgaccagagagagagttcaggacagtatagacagcccagtggccaagggatgagttttgcaggtgtctgagtgaatgattaatcctccagctgtaagaggtgtcaggagaggctgggcgcggtggctcaagcctgtaatcccagcactttgggaggccaaggtgggtggatcacgaggtcaggagatcgagaccatcctggccaacatggtgaaaccccatctctactaaaatacaaaaattagccgggcatggtagcgggcgcctgtagttccagctactctggaggctgaggcaggggaatcacttgaactcgggaggcagaagttgcagtgagccgcgatcgggccactgcactccagcctggcgacagagcaagactgtctaaaaaaaaaaaaaaagaagtgtcaggagcacaggcttgaggtcagatccgagctgggttctggtcccagttccaccacctgttagccgtgtaacttcactaagtttccgtcttcccatctttaaaatgggaataagggttggttggggtttctatgaagtaatctgtgtaaggtgcatcacagaagtgtctggcatatggcaaactttccatcagtgttatacaccctttgcatatgcgaatgctcccaggcttggatgtttaggttaacattccaaattataaagagtttggaaaatttgagcatctcggatgttgtttggaccgagtcagggtttacgctttatcagtagtttcctatttctgtaggtcagcaagcctttttgcgaaaaaaaaaaaaaaaaaaaaatgaagatgtgtttgttctagagcaaaaaagagcaaacagctggcaggcataatacatttcatttttgtaaacgttactttgttttggttttgtatagcttatttagtttttgttttcttctgaaattagtatgtgattttacttaaaattttttttttctttttagagacagggtctcactctgttgcccagactggagtgcaatagcacaatcatagctcactacagcctcgaactcctgggctcaaataatcctcctgccacaaactcccaagtagctgggactacagacacgcgcttccatgtctggctaatttttaaaaattttttgggccgggtgcggtggctcacacctgtaatcccagcactttgggaggcccgggggggggcagatcacgaggtcaggagattgagaccatcctggctaacacggtgaaaccccgtctctactaaaaatacaaaaaattagctgggcatgatggcgtgtgcctgtagtcccagctagtcaggaggctgaggcaggagaatggcgtgaacccgggaggtagaggttgcagtgagccgagatcgtgccactgcactccagcctgggcaacagaacgagattccatctcaaaaaaaaaaaaaaattttttttgtggggtctcgctatgttgcccaggctggtcttgaagtcctggactcaagcgatcctcccacctcggcctcccaaagtgctaggattacaggcgtgagctgccacagcctgtggtttttgtttttgtttttttaactgacagataacagtgtatgtatttatcatgtgcaacgtgacatattcttgaaaaatgcaagaggagcggatgttaagcactttcaccacaaaaatgagagctatgcgaagtgctgcatttgttactaagctagatttaatcatgccactgtgtatatatacttcaaagtgtgtttcctttttctttttccttttgttttttgagacggtctcgctctggcgcccaggctggagtgcagtggtgtgatcttggctcactacaacctccgcctcccaagtttaagcaatttcgcctcagcctcccgagtagctgggattacaggtgtgtgccaccacgcccagctaattttttgtatttttagtagaggcggggtttcgccatgttggccaggctgatgtcgaactcctgacctcaggtaatatcccctccttggcctccaagagagctgagattacatgcatgagccaccacgcccggtcatatttcatttttaaatggcataccttagagaagcagaaaagagaccgggcaccatggctcacacctgtaatcccaacaccttgggaggtcgaggtgggcagagaggccaggagttcgagaccagcctggccaacagggtgaaaccccatctctactaagaaatacaaaaattagctgggcgtggtggcctgcgcctgtaatcccagctacttgggaggctgaggcaggagaatcgcttgaacccgcaaggcagaggttgcagtgagccgagatcacgccattgcactccagcctgggcaacagagctagactctgtctcaaaaaaaaaaaaaaaaataaagaaagaaagaaaagagattctttggttccttctctctttcttgcttaaatcgacttgagaatgtccccactttgaaaggggaagtagcacatacattgtttctggcatagctgtagtataattttcattcttgtcacacagtagcaattacggcttcaaggccattgccctttgtgggccagggccgtggtgactggctgtgcctccctgggtgtttacctagcacatgtttaacatagctcagatcgtgtgtcaagatctccctcattctcactcatcctgggtcatgtttctatctcttcaaactctatgacttacaaaacatttttgctgccacctctctgaaaatcatttaaaagcccagagaccttatatgaagtccagccaatcgctgtttctttgttatttgttaggtaaactttactttccccctgagacggtcaagaactactgtgtttgaaaaccctctctctaggtgcaaaacagcaccagtggaagcctcgcagctgcctggaggaattttttgaggggaggattgtggctgactgggtgagggagggaaactgggtaaaataatgtcctccgagagcattcggtgacagcagttgttctcatttttgtgatgcaaattaagttgtatgtgaactaaattaaatttgcttgcttctctgcttttgtcagagatagattcatagtttcaactgagtatagagttctagtctgattatgttcaatatgttcaaagcagtagatacactaatgtttttttttccttcttttttttttttgagacagagttttgctctgtgccccagcctggagtgcagtggcgcgatcttggcccactgcaagctccacctccgggttcacgccattctcctgcctcagcctaccgagtagctgggactacaggtgcctgccaccacgcctggctaattttttgtatttttagtagagattgggtttcaccgtgttagccaggatggtctcgatttcctgacctcgtgatccgcccacttcgcctcccaaagtgctgggattacaggcgtgagccaccacgccttttttttttttttttgagacagagtttcgctcttatcacctgggctggagagcagtggtacgatcacagctcactacagcctcgacctcctaggctcaagcaatcctcccacttcagcctcccaaggagctaggactataggtgcgtaccaccgcgcccaattaatttttgtatttttgtgtgtgtgttagagatagggttgcccaggctggtctcaaactcatgggctcaagcgatcctcctacctttgtctcccaaagtgttggtattatagatgtgagtcaccatgcacggcttcatacactgatttatggtcatatattgaaaaaatatatattctaaaggtttcactaacagtacacgtttaacacattgtggatggtggatggttacatttttaattcacgtcacttttttaatacagcagctttattgaaatataattagcacagcataaaattcaccttttaaaagtgtaccatttggtgtgttttaggatattcacagagttaagcaacagtcatcagtatttaattccaggacatcttattatttttttaaaaaaacagggtcttgctgtgttgtccaggctaaatgcaaactcctgggttaaagtgttcctcctgccttagcctcctgagtagctgggactacaagcatcagccaccatacctggctcagttcatcattcttatgggtgggtttcaggaggagagaaagtgaaaagagggagttggtctggagaaagtctcagctcaaaaatgaaaacaaaaattggccgggcacagcagctcacacctgtaatcccagtactttggaaggctgaggcaggaggactacttcaggccaggagttcaagaccagcctggatagcatagcaagaatcctatctctacaaaaaattgaaaaattggcaaggtgtgatggctcacacctctggccccagctacttgggaggctggaatggaaggattgcttgagccttgggaggtcaaggctgcagagagctgtgattacaccactgcactctagccttggcaacagagcaagaccctatctctaaataaataaatatttataaatgaaaagagggagtcctgagcaggtgctctctcattgcagtgtgggatggaaggaggggaggaccatgtcagattacttggcaggaatctagcatcatcttgcatacagggacatcccagttacactctgtgtagggatacctctaatttgctgacgtttcatttgaagagcaaaattgaatttagaaaccatagtaagttgggaagttatccacaatggggattactggactcattagttcccttacgggggtgaaatggatagtgacggaccaggtagaatgtagagcaaaggatttcagcatccttgggcgctggaggcagcaagggatcagctctgtagcgctgacaatgccagggtgtggtggccagtggtgggtccgtgtgaccctttgtgatgtccacttgggggctcctaaccaatgaggttttgtttgttttggttttgagtcagggtcttgccctgtcgcccaggctggagtgcagtgtcacaatcatagcccactgcagcctcaacctcctgggctcaagtgatcctcccacctcagcctcccaaatagctggaaccacaggcacacaccatcacgcctggctaatttttttttattttttggagagacaggggtcttaccatgttgcccaggctggtcttgaactcctgaactcaagcaatctgcctgccttggcttcccaaagtgctgggattataggcatgagccattgtgcccatccctaagagagatgggaagatggaaaaattggaaccctcatacactgctggtgggaatataggttggtgtagctgccttgggaaacaggcagttcctccaaagcttaaaccttgagttaacccagcaattctgttcctctgtaggttcctaaggcaaatgaaaacataggtctacacaaacacttgcagaggaatgttcatagtagcattattccaagtagccagaaagcagagacaacctaaatgttcatcagctgaggaacggatacataaaatgtggtcccgccatactgtggaatattacttggccatgaaaaagaagttccgatacagagatggacctggaaaaaacttgctcagtggaagaagccagtccccaaaggccacctgctgtatgattccatttatatgaaatgtatacaacaggcaaatccacaaggacagaaagtggattagtggttgccacaggctgggggtagtggagtggggagtaatggccaaggtaatggggtttctttttgaggtgatgaaggcattctaaaattgactgtaggctgggcgcagtggctcatgcctgtaatcccagcactttgggaggccaagacgggcagatcacaacgtcaggagttcgagaccagcctggccaacatggtgaagcccaatctctactaaaaatacaaaaattagccaggtgtggtggtgcgtgcctgtagacccagctcctccggaggctgaggcatgagaattgcctgaaccccagagacggaggttgcagtgagccgagatcctgccactgcacttcagcctgggcaactgagcgagactctgtctcaaaaaataaaatgaataaatacataaaatagattgtgatgacagatgcagaactctgtgaacatactaagaaccattgaattggatgctgtcaaagggtgagttgtgtggtatgataattctatctcaataaagcagttacaaagagaggaagagatggaataagaactggaagcacagtggcaatgggacagaattttaaggaatggtttgagactgagtggcaggaagactggggggtaaagctaagagaaccctaaaggaaaggggaccagcttgccccgtaagtggtgtggggctaggttaatagattgcctaatgcccaggagatgtcagtgtgcccatgcgctggtccctgccatgtaggaccacgtaggagaaggttacaaagtgtgtctgtaccatccagtgtgacaaagtgagagcctcggagcaggtatagcccaggcatgacccagaaagccctcttgaccagctgctgctggccaagataattatatgatcacaatttatgttatattatagcaaatttaaaattgggataatgtgattcacataccacagaactcacccttttacagtgtacaattcaatgtgtttgttttgtcttttctgagacagaatctcactctgtcacccaggctagagtacagtggcgcgatctcggctcactgtaacctccgcctcctgggttcaagcaattctcttgcctcagcctcccaagtagctggggctacaggtgcaggcctcctgacctcaagcaatccgcccgccttggcctcccaaagtggtgggattacaggcgtgagcccaccacacccggccaaatcagtgatttttactatgttcacagagtggtgcagctgtcactactataatttcagaacattgtcatcacccacaagaaaagctcacacccatagctttcactgcccattcccccatcctcccagcccccagcagccacgaccctactttctgtctctagatctgtctattctagacttttcatatcagtggaatcttacagtatacttgatgtattaatgtgacttcttttacttagcataacgattgcaaggttcatttacgttgttgcctaaacttagctttttctttctttctttctttctttcttttttttttttttgagacggtcttgctctgttgcccaggatagaggaatcacagctcactgaagccttgacgtcctgggcgcaagcaatcctcccgctttgtcctcctaagtagctggcactacaggtgtgcgccaccgtgcccggctaattttttattttttgtagagatgaagcctcgccgtgttgcccaggctggtcttgaactccttggctcaagagatcctcctgctgggctcaatgactcacacctgtaatcccagcactttgggaggccaaggcaggcagatcacctgaggttgggagttcaagacctgcctggccaacatggcaaaacctcatgtctactaaaaatacaaaaattaaccaggcgtggtggctggtgcctgtaatcccagctactgatgaggctgaggcaggagaatcacttgaacccgggaggcggcggaggttgtagtcagacgagattgagccagtgcatgtcagcctgggcaacagagcgagactccgtctcaaaaaaaaaaaaagagatcctcctgcctcagcctcacagagtgctgggattagaggtgtgagccactgcacctggcctagttatttgtaatctgtaagaagaaatgtgaaggaatagtaaggagcaccttgccagaggcaggtacgggctgccctggggccgtttcactgagttgacctgaccttgtgtgttcattgttgatcccttccctgtcctggctccagggagccagttagatgctcgaggggcttctcgggctgcgttctctgttgtcctgtaaataccgactgatctggataacagttgtcaagtcacaaaaaagagaaacacagttaggtagaaacccaaagcaaacccgctctgtgaggctgaggcaggaggatctctctcttttttttttttttttttttgagatggagtctcgctctgtcacccaggctggagggcagtggctcaatctcggctcactgcaatctccgtctcccgggttcaagtgattctcctgcctcagcctccccagtaactgggattacaggcgcccaccaccacacccggctaatttttgtatttttagtagagatggggttttgccatgtctctattaaaaggccttttagatagatcgtggagctaatccgacctgaacatcccagtcctggagtattttagcatgaggatagctctctattggtctggaaggttcgcctgatggttgggcctgaagacaggggcctcagggactctcttgtagctccttcagatgggtgcttttgttttgaccaaaaacagaacattctataccgtgatccaatgggcacacgtacaataataggatgcaaagtgttaccaaaccgaactcacctttattgtgtgcgacagactcgggtgctttatttttatttttatttttttgagatggagtctcactcacccaggctggagtgtaatggcatgatcttggctcactgcaacctctgtgtactgagtttaagagattctcctgcctcagcctccccagtaactgggattataggtgcccgccactatgcccagcttattttttatatttttagtagacacgaggtttcaccatgtcagtcaggctggtctcaaactcctgacctcaggcaatccgcccgcctcagcctcccaaagtgctgggattacaggcgtgagccaccgcgcccagcgacctcttccaacttctaaaaggtggccctagggattcctcggcttgtagccatgtcattccacaccctccgtggtcacgtggccttcacctgtgtgtgtgtttcccctctgtatctgtgtctctaaatctccctctcctttctctacacagacaccagtcataggctctagggcccaccctaaatcgaaatttcatcccgagatccttaactaatgacctctgccccaggctctctttccaaagaagtccatattccagggttcttagtggacgtgaattttggtgggacactgttcagcccacttcaggaacctcctatttctagcgatttgtaaacaacaaatttgttttgttttagtttttgtttttgaaacagggtcttgctctgttgcccaggctggagtgcagtggtgcgatcatagctcactgcaacctctacctgccaggctcaagcaatcctcccgcctcagcctcctgagtagctgggaccacaggcatgcaccaccacgcctggctaattgttggtttttgtaatgctgttttgtagagatggggttccaccatattgcccaggctggtcttaaactcttgggctcaagggatcctgcttcagcctcccaaaacaccgggattccaggtgggagtcaccattcccagcctagaacaagtttacaagctattggcactcatttcttaggctctttacaacacagtgattttccagtattttgaagttgaagtaaatgtagaaggtctcactctttagaaccagttaattgcagagaggaaagaggaggtcttcaggagaacaccagattctttttgttgttgttgttattgagacggagtttcgctctgtcacctaggctggagtgcgttggcgctatctcggctcactgcaacctccaccatccgcttgggttcaagcgattctcctgcctcagcctcccaggtagctgggattacaggcgcgtgccaccacgcttggctaatttttgtatttttagtagagacagggtttcaccatgttggccaggctggtctcgaacccctgacctcaggtgatccacccacctcggcctcccaaagtgctgggattacaagcgtgagccaccacacctggcctccagattctttttgaaaagcttctaaatctgaattctctgtgaatataatttgccaaaacgtatgagtaggaatctgatattacagtctgtcaaatgtctggccgtgtgcctatactccatataatcttttccttcccctgcattcagataccaccttcatcaaacacaaaagtgttatagattcagagagggcaaaaaacaaagctgtaccagctgccttcccctgcacctagcttacgagctgaccttgagacacaggatatgttaaaatatattcaagctcacactgttgcagttctaaaaggaatgctaatgaaggtctttgcaaggttctggaattttcctagcgtaggagctggttgctgacttatattaatagttatagccacctggcacagtggctcacgcctgtaatcccagcactttgggaggccgaggtgggcggatcatgaggtcaggagattgagaccatcctggctaacacagtgaaaccccgtctctactaaaaaaaaacaaaaaaaaacaaaaattagccgggcgtggtggcgggcgcctgtagtcccagctacttgggaggctgaggcaggagaatggcatgaacccgggaagcagagcttgcagtgagcggagatcgtgccactgcactccagcctgggcgacaaggcaagactccgtctcaaaaaaaaaaaaaaaaaaaggttatagccatcatactcaggatggtagggaacttgagatgctcagaaaccaaccactggccaggcatggtggctcacgctggtaatcccagcactttgggaggccaaggtgggtggatcacctgaggtcaggagttcgagaccagcctggccaacatggtgaaaaccccgtctctactaaaaatgcaaaaattagccgggtgtggtggcgggcacctgtaatcccagctactcaggaggctgaggcaggagaatcgctggaacccaagaggtgggggttgaagcgagccgagattgagccactgtaccccagcctgggtgacagagtgagactgagtctcaaaaaaaaaaaaaaagaaaccaacctctttgctacttgtttgtggcctgtttgctcccagcatgggcaatttcaagcgtctggaattcagtaatgactttgcacagcgaatccactttgccactccttttattccggttccttctgcacatcagggatagagcattgggagttcccagactgcatgagcccagctggttgcatttgaattcttggaaataggctctcccttccagaacaaaccaattagatatagtaggccaggggccagcaaattttttctgttaagagctaggtagaggccgagacgggcggatcacgaggtcaggagattaagaccatcttgactaaaacggtgaaaccccgtctctactgaaaatacaaaaaaactagccgggcgtggtggccgcgcctggagtcccagctactcgggaggctgaggcaggagaatggcgtgaacccaggaggcggagcttgcagtgagccgagaccgcgccactgcactccagcctgggcaacagagcgagactccgtctcaaaaaaaaaaaaaaaaaaaaaaaaaagaggtagtaggctgggtgcagtggctcacgcctgtaatctcagcatttcaggaggcagaggtgggcagatcacttgatcccaggagttggagaccagcctgggtaacgtggtgaaaccccatctctactaaaaatacaaaaattatccaggcattgtggcttatgcctataatcccagctacttggggggtgagacaggagaattgcttgaactcgggaggttgaagttgcagtgagccgaaatcgcaccactgcctccagcctggatgataaagtgagaccctgtttcaaaaaaaagagaaagagccagataataaatatttcaggctttgcagcccacatagcctctgtcacagccactcaactcaaaagaagccacagacaacagagaaacaagtgggcgtggccgtgttctgataaaattttatttacaaaaacaggtggccagcccacagacagtaggggttcaccagcccctacagtagacgcatcatttttacagttctgtttctagggccacaatggtctgactaaatttggcgagggatgcgggttagggaacaggaggccctcacctgtctcatgagcttagcagctgtgtcccaggttgacctcttcacaatctgggcccatccatgagcagcagctccctgaggggcccctctttatcctgcagtgtgttttctaagggagtaatgatctgttgtggtatttgcaagcctgggggtgttcaacatagagtttgagtccccccagatgaaaacaacaagaccggctgagtgcagtggctcacgcctgtaatctcacactttgggaggctaaggcgggaggatcacttgaacccaagagttcaagaccagcttgggcaacatagtgagaccccatctctacaaaaagaaatatataaacttacacacgcgtggtgactacaggtaggtagtgtgcacctatagtcccagctacttgggaggctgaggcaggaagatcgcttgagtccaggagttcgagactgcagtgagccgtgattgcaccactgcattccagcctgggcaagagcaagaccctgtttcttttttttttttttttttttgagttggagtctcgctctgtcgcccaggctggagtgcagtggcgtgttctcggctcactgcaagctccgcctcctgggttcatgccattctcctacctcagcctcccaagaagctgggactacaggcgcccaccacctcgcccggctaattttttgtatttttagtagagactgggtttcaccatgtcagccgggatggtcttgatctcctgaccttgtgatccaccgcgtccggccgaccctgtttcttaaaaaaaaaaaaaaaaaaaagacttaatggcagtcccagtccatgctatggaaaggttggcctctgtgagagtttggattagattggaaactaatgaagagtcttttttttttttttttgagttggaggccactctatcacccaagctggagtgcagtggtacaatctcggctcactgtaacctccacctcctgagttcaagctattctcctgcctcagcctcccaagtagctgggattacaggcgcctgccaccacctccagctaatttttgtatttttgtattttttagtaaacacggggtttcaccatgttggccaggctggtctcaaacacctgaactcacacttgagccaaggcccacctcggcctcccagagtgttgggattacaggcgtgagccatcgcgcctggcctgtgaggggtttttctttctttctttcttttttttttttttttattgagatggagtctcactctgtcgcctaggctggagtgcagtggtgcaacctcagcttacttactgcaacctccgccctccaagttcaagcgattctcctgcctcagcctcccaagtagctgggattacaggtgcctgccaccacacccggctaattttttttgtattttttttttttttttttagcagagatggggttttaccatgttggccaggttggtcttgaactcctgacctcgtgatccacccgccttggcctcccaaagtgctgggattacaggcgtgagccatcatgcccggcctgtgaagggtttttctaaggttcaccagccctgacatcattgcagttccctttttccagaaatgcagtgcccttgaatactttccccgcccattgaaggcaaacagggttttttctggcattctgcacacctgttttgctgccctgccttccgcctgtgactgattgcttttgatctgctgaaagagaaacccccggcctctctcaggtgtttggtttcctctgtccgtcttagagtcacctctgctgacatttatttgctgtttatttcccacattaaaattgttggcttgaaatatatatatatatacacacacacatacatacacacacacatatgtatataaatcttccagctttctggaagatttcagctatgtaactagacctgaattaatgttttcagaatcagtcttcttttcatcaaaatgtttttcaggggctgggcatggtggttcgcgcctgtaaatcccagcactttgggaggctgaggctggcagatcatctgaggtcaggagttcgagaccagcctggccaacacggtaaaaccccatctctactaaaaataaaaaaattagctgggtgtggtggcatgcacctataatcccatttacttgggaggctgaggcacgagaatcgcttgaacctgagaagcagaggttgcagtgatctgagattgtgctattgcactccagcctgggcagcagcgtgagactccatctcaaaaaaaaaaaaaaaaaaaggtttttcacccttgtcattttgatttctgcccagtcaatagaactaacataattgtttaaaaaatgccacgcactgcccttcctaagaaggcctcagggggtggaatagttttgctgggacctcttatacttcagcatctggcctgtacccagtgtcaagagaaatactcacaaggcagatgctttttcagcatctgcaatatctataggtgatattgaaggtccctccatcctgataccagaaaatagtgtgaaatttgcacaaaaggaagcagaggatctcagaacaagcctgggcagcgcagggcctctccacctgagacctggccttaggcactttcttttgtcagatatgttaaaaatgaagttgcacaccaagcttctctctttccttcttttcttcctgttcctttcccctacctcttccccttccccttccccttcccctttccctttccctcccctccccttcccttttcttttctatttcttttcttgacagagtcttgccctgttgcccaggctggagggcagtggtgtgatctcagctcactgcaacctccacctcccaggttcaagcagttctcctgcctcagcctcccaagtagatgggattacaggtgcacaccaccatgtccagctaagttttgtatttttagtagacacaggctttcaccatgttggccaggctggtcttgaactcctgacctcaagtggtctgcccacctcggcctcccaaagtgctgggatgacaggtgtcagccaccgtgcccagccaagtggcatctttttttaaaaaaatcattttttaagtgcacaggttggtggcattaaacacatacacattgctgatgctaccatcaccaccatccatctctagaactttctcctcttcccaagctgcaactctgtcctcataaaacactcactctccatccccctccccagcccttggcacccaccattctacttcctgtctctatgaatctgacaactctagggacctcctagaagtggagtcacatacgatgtattcttttgtgactggcttatttcactgagcatagtgtcctcaaggtccatctgtgtgtcagaacttccttcttaaggctgaataatattacagtgtgcgtgtatgtcacgttttgtttatccattcatctatacatgcacacttatttccatgttttgtgtttttttgtttggtttttcttttttttttttgagatggagtctcgctctgtcacgcaggctgcagtgcagtggcgtgatcttggctcactgcaacctctgcctcccgggttcaagcaattctcctgcctcagcctcccaagtagctgggattacaggggcgcgccaccacacccggctaatttttgtatttttagtgttggtcaggctggtctcgaactcctgacttcgtattccggcctcctcggcctcccaaagtgctgggattagaggcgtgagccaccgcgcccggcctatgctagggtttttaggaaccaccaagctgtcttccatagcagctgccccattttaccttcctaccagcagtgtatgagggtcctggtttctccgccttctcaccgagacacttaattttcggttttttaaattataccattttaggccaggaacggtggctcagcctgtaatcccagcactttgggagacgaaggtgggcggatcacctgaggtcaggagttccagaccagcctggccaacatggcaaaaccccgtctttactaaaaatacataaagtagccgggcgtggtggcaggcgcctgtaatcccagctactcaggaggctgaggcaggagaatcacttgaacccaggaggcggaggttgcagtgaactgagatcgagccactgcactggagcctgggtgacagagcaagactctgtctcaaaaaaaaaaaaaaagtaaataaaataaattatcccatcttagtgggtgtgaagtgggcggttttgctttgcgtttccctggtgactactgatgttgagcgtcttttcatgtgctgactggtcgtttgtatctcttctttggagacgtgtctgtttacatcctttgcccatttgtgaatgggagtatttgttttttattgttgagttggaggagtccccttactagttgcatctgacactataggatcttgcaagaactggaaagcaagtcacagtttcccgtgacctttggcatttcagccagcgaatcaggatcaaacacatggaaatagaaagcatctaaccacgtcccacaccatatttttgggggcaggatcagaagcacgcagagatattaagatagttatgggctgggtatggtggctcatgcctgcaatcccaacactgtgggaggccaaggcaggaggatcgattgagcccaggagttcaaaaccagcctgggcaacacggcaagaccctgtctctaccaaaaaaaacacaaaaaacaaaaagcttttttttttttttcttttttttttgagacagagtcttgctctgttgcccaggctggagtgcagtggcacgatctcggctcactgcaagctccacctcctgggttcacgccattctcctgcctcagcctcccaagtagctgggactacaggcgcccgccaccatgcccagctaattttttgcatttttagtagacacggggtttcaccgtgttgaccaggatggtttcgatctcctgacctcgtgatccacctgcctcggcctcccaaagtgctgggattacaggcgtgagccactgcgcccggcaaaaaaatcttttttaattagccatggtggtgtgcacttgtagttccagctacttgggagatagggagaaggattacttaagccccaggagtttggggctgcagtgagctatgattataccactatactccagccgagactctgtctccaaaaaataaacaaacaaacaagatggtcgtgaggtaatcatcttttagccatgctcatcggtggatggaagttcacaaagctgttaattaatgggctgatgttaacttagtaggaagccacccacggttctgtcctctgctgtgtctcggtcagtcatttaacttgtaatttgggaagataaagatgtagaaagcttatttatcaaagctggagatgacagacagctataggggtggctttaatcaccaggtgacagagtgagtaccgggatgcttagattcctgcgcgtgggtctaaatcagggtttcccagcctagatactgtaggcatttggggccggatcattctttgggatgggacctacctgggcactgcagggtgctgagcagcatccctggcctccacccaccagatgccaggagcacccctcttcccccctcactcccatagcaaccaaaaatgtctccagactctgccaaatgaccctgggagcaagaatcacccctggtagagaatcgttggtctagataagcaaccatataagtacaggatggggaaatagaacctcatgacagcttgtgaggaaacaacttcggggtttcagttgatcgtttttttaaaaagtcataataatactagtttgagggccaggcgcggtggctgatgcctgtaatcccagcactttgggaggccaaggcgggcagatcacctgggtcaggagttcgagaccagcctagccaacatggtgaaccccatctctactaaaaatacaaaaattaggctgggcacggtggttcacgcctataattccagcactttgggaagctgaggcaggcggatcacaaggtcaagagatcgagaccatcctggccaagatggtgaaaccccgtctctactaaaaatacaaaaattagctgggcatggtggtgcgtgcctgtgatcccagctactctggaggctgaggcaggagaatcgcttgaacccgggaggtggaggttgcagtgagctgagatcgcgccattgcactccagcctggcgactgcgagactctgtctcaaaaaaaaagaaaaaaacaaaaacaataaaaatacaaaaattagccgggtgtgggggcaggtgcctgtaatcccagctactcgggtggctgaggcaagaggatcatttgaacccagaaagcagaggttgcagtgacccgagatcgtgccactgcactccagcctgggccacagagtaaaattccatctcaaaataaataagtaaataaataaataaaataatactagtttgagccagtgattatgatacaactgtgttctcccctcccccaaaataaaaaccacgcatgccattcagctattctgctcccaagaccgctttcaacaaagctggacccaaggaccttagttccatcccttatcccattgaatctccaggcagctccattaaaccacctccctaaccctgctcctgggcactcctgggttctcccgggcttcaggtagcaccttaggcccaaatgtccaccccttgcttagagcgccctcctgagcgcaacaccccgtgccagcggctgcctgctgccgagcccgccactctgccccccacttcatggcccctgcaccgcccctctctgccactctccaccctgccctcgaggtcccggtccccctgcgtccaccagcaaccccttccagtgtgccctgctccccacgctgcagccatcgtttcgagaagcagagctcatccaatcctccacataaacctttccgtggcttcaggttcaatgacaaagtgactctccaagggcccccaaggcccatggcagaacctcctggaataagacattccctccaccctgccctttcctttctctgaccggtccagaccaggtccctcccagacgtcctctccctccctccctgaagcgcgtatttgttaagcacccacccaccacatgacaggcctcgtgccagccatgaccacagagacccgcagctcctggagtttcccttctaaataaacaaaactacagttgagccttgggatttgcagagtcagtgtttacccttttgaagatatacccaggagtagaattgctggatcggatggtaattctttgtttaattttcacccgcttgctaaaatttctctgtaaccgcaacatgaatccattcatattggtgcagagtggagaaaacttggagttcccacacaggttcccagctgaggctgagcgaggcgacactccaccttctcgttcagcctctcacactgtaaacacatgccctgttgaaggtctatggagtaccacggttttcgcatttgtgtgcttcttgttggtgatgttaatgttgaaaatgacccctagctgggcgaggaggctcatgcctataatctcagcacactgggaggcctaggcaggaggattagttgagcccaggagtttgagaccagccagcctgggcaacatagcaagaccctatctctaaaaaaaaaattttttttaattagccaggcatggtgtcacacacctgtggtctcagctacttgggaggctgaggcaggaggatcccttgattccttgagcccaggagttcgaggctgcagtgagctacgatcacgccactgcagtccagcctgggcagcagagacctcatctctaaaataacaatataataataaattttttagaaaataaaatgaccttcaaacgtagtgctgcagtgccagcaagtgcccctgagtgcaaggaggctgtgatgtgcctcacggagaaaattcgtgtgtgtgtgtgtgtgtgtgtgtgtgtgtgtgtgtgtgtgtgtgtgttttggggtggatgatattttatttgggtttttttttttttttgagacagagtcttgctctgctgccaagcctggagtgcagtggcacgatcttggctcactgcaaactctgcctcccgggttcacaccattctcctgcctcagcctcccgagtagctgggactacaggtgcccgccaccacgcccagctaattttttgtatttttaagtggaaacggggtttcactgtgttagccaggatggtctcgatctcctgacctcatgatccgctcgcctcagcctcccaaagtgttgggattacaggcgtgagccaccatgcccggctgtttttgttgttgttgttgttttttgagatggagtctcacactgttgcccattctggagtgcagtggcaccatctcggctcactgcagcctttgcctcccaggttcaagcgattctcctgcctcagcctcccaagtagctgggattacaggcacgcaccaccacacctgcgtaatttttgtatttgtggtagagacagggtttcactatgttggtcaggctggtctcgaactcctgacctcaagtgatccacccgcctcagccaccacccaaagtgctgggattacaggtgtgaaccactacacctggcctggatgatattttaaacaaggtggcctctggggcttcactgagaaggtgggcaggtcagacaagatggcttaccacctgtaattctagcactttgggaggcagagggaggaggactgcttgaggccaggagttcaagaccagcctgggcagcatagcaagaccctgtctctatttgaaaattatacatttaaaaataaaagttggcccagcacagtggctcacacctgtaatcctagcactttgggagaccaaggcgggcagatcacttgaagtgaggagttggagagcagcctggccaacatggcaaaaccccatctctactaaaaatacaaaaatcagccagacgagtggcgcacgcctgtaatcccagctactcgggagactgaggcatgacaatcacctgaaaccaggaggcagaagttatagtgagctgagatcgcaccattgtactccagcctgcatgacagagcgagactcggtctcaataaaaataaaatgaaaaagaagatggggacaggcagaaggagcagcagccacgggggcccagtgggatggtgacatgtttggaggaggccggggtgggtggagccaggtggcccaggagagtgggagagtgaaggctggtggtagctggtgaggagatagcctgggtggggccagaggtcctggactctctgtaagagaccagatggtacataccttgggctttgtgggcagcataaggtctctggtgcatatttttgctctaccaaaggaggtgctggatttggccctggggccatagtttgccgaccattcttgcaggtcacagtgaagacgggttcctggggaaggtgggggccatggcagggctttgagcagaggagggacatgcctgacttggttgttagttgaatcattccagcagctacggaggaagtgaatggtagtacaaatagtcaaggaaagtatttgctttgtgtcagacagcattccagaatgttctctatcacagccaacccccagagagggcattactggttttttgtgtttgtggggtttttttgttttgttttgttttgttttaaggcgggatctcactgtcaccccagctggagtgcagtcgcacaatcacagctcactgcagcctagaactcctgggcgcaagcgatcctcctgcctcagccccccaagtaactgggagcacaggcgtgcaccatgcttgactaattttttacttttggtagaaatggggttttgcaatgttacccagactggtctcaaactcctgggctcaagcattcctcccactctgtcagtgacagatggccactctgtcaccttcttgccacctcagcctcccaaagtgctgggattacaggtgtgagccactgtgcccagccagcaggcactacgattatccccatcctacagatgggggaaatggaggcagggtgcagttaggtccctggctctggatctcggaggtgggggtttgagcccgggcagcgtggctgcgatgtctgttcctagcacacctgccctctctgccccggcccatgtggctgatggagttgtcggtgtggattcaagggggagagagggaggagaggaggtgaaggtggcactcattgacggctcttttgagtttccacaaatacttgtttcctggagagtctttcctttcagacatctgctagtccacctggcgcctgttcagtaagcaccagggaatggaagggcctctcccttcatttctgcattgcaggtgtgtctgctctccagccccccagcagcccctcaccccaggtgcacccgcactcggcctctgtaccccagatgtacccacactcggcctctgtaccccagatgtacccacactcggcctctgtaccctgatgtacccacacttggcctctgtaccccagatgtacccacactcggcctctgtaccccagatgtacccaccctcagcctctgtaccccagatgtacccacactcggcctctgtaccccgatgtacccacactcggcctctgtaccccgatgtacccacactcggcctccgcaccccaggtgtgcccacactcggcccccgcacctgggtgtgcccacacttggcccccacacccgggtgtgcccacacttggcccccgcaccccagatgcgcccacacttgccccctgcacccagatgcacccacactcagcccctacaacccagatgtacccacacttagtccccccacaccccaggtgcacctgcagctccttcaccacagcctgggcagcccatcccactgtgaagggaactcccggcctccagcctgtctcagaaggacccctctctccctacccttgcctgctgcaggacaggcaccaccctagtcttgccctgaaacccaccctccctcaaaacccttttctcttgaagggtttccttttctccatcaggccaccctagcctaaacctcacggaggattctcccacacactccagacctgccgtcttgagcactgagttgcgtagggtgtgttgcagtcacttgggaaggtgtcgggcagggcacttttccccaggacagacttctgaaccccaagcccatgcaggtggcccttacctcttcttcatctgtgttttgaatacacaccctccaccatagaaagctgcctggagtggaagcacctggggtgcacccacacttgggctctgtaccccagatacacccacactcggcctctgtaccccaggtgtactcacactcggccctcataccccaggtgcgcccacactcggcctccacacccacactcggcccctgcaccccaggtgcacccacactcagcccccacactcacgctaagccctgacgacagcctcaggccagctgagctctcagagattggcaactaatcaaaaaaggccagctctctctatatattttagagattgggtcttgctgtattgtccaggctggtcttgaactcctgggctcaagtgatcctcctgctgcagcctcctaagtacaggtgggactggggctacaggtgtatgccaccacggccagctgagcaattattattattttgagacaggatcttgctctgttgccctggctggagtgcagtggcacaatctgcaacctccacctaccagttcaagcaattcccgtgcctcagcctcctgagtagctgggactacaggcgtgtgccatcacattcagctaatttttatatttctagtagagacgtggtttcatcatgttgcccaggctggtcttgaactcccagcctcaggtgatccgcccacctcggcctcccaaagtgctgggattccaggcgtgagcccccacgccgggcctgttttgcttgtttttaagtgacttgcttttcagtttttccaaagcatttgactctgtttcgtagaaacactcaactcttttgcacccatgggttcatgagttatgagtttaggtggcactttgtcgctcaagtgcataactttgatggcaggcagcgatggcacacacagccctgggaacaaacagtaatggctctgggtaagcacagtttgcaggcagacggctgcagagggcaggtggccctgccctgagtcacacccgtcgtggagaggagacgttatggggtgagcctgtcaaacctaagagtcttaagactctgtctgctgtgctggttcacctgggatggatggcggacagctctgttcaaaactgttttttgtttttttgtttttgttttgaaacagtcttgctctgtcgcccaggctggagggcagtggtgcagtgatggctcactgccgcctccaccttccgggctcaagtggtccttccacctcagcctcctgagtagctgggtctgcaggcgtgtgacaccacactcagctaatttttgtattttttgtagggatgtggtcccactgtgttgtccaggctggtctcaaaactcctgggctcaagcgatctgcccacttcagcctccaaatgccgttcctcaggattatgtctttgactgcagtcggcccttgaacagcacgggtttcagctgcgtgagtccagttacacacagacgtttttcagtcaatacagtcagccctctgcagccacaggttctgcttctgcaaccaaagcagaccaaaaatacagtgttctcaggatgaaaacccacagattcagagggccgacttttcccatatgccggacaactgtacccccctcttcttttctgtttctgcacatggactgctcccaaatagatatccccagctttggccggttgcagtggctcacacctgtaatcccagcactttgggaggccaaggcaggcagattacctgaggtcaggagttcaagaccaggctggccaaacatggtgaaaacccgtctctactaaaaatacaaaaattagccaggcatggtggtgcacgcctgtaatcccagctacttgggaggctgggacaggaggatcacttgaacccaggaggcagaggctgcagtgagctgagatggtgccactgcactccagactgggcaacagagtgacactccgcctcaaaaataaagaaataggtgtccccagccttgatgatggccctgactccacgcacgtctcaacagccttcaggacttctgagcagagggtcctgggtggcatttcagactgaccatgtctgctgggagagctgttctttttcccacctctgtccccttctcccttccttcttccaggtcccacctcggtggcccaaaccagacatcttcgtcatcctggcctcctccatccgtgcccgtgtttaccggggcaccaagccctgctggttctgcctctgacctcctgtcccaacttttcaccctctgccttccttaagggctttgtcacctcgcactcaggctgccaaactggttccctgcctctgtcatctctctgtccccgtctaatcatttgcctctcctatcactggttacctctgtaatgcaggtttaatcatgcctctccctgcctaaaaccttcccctggctcctattctggaagagtgtcgtagggcagcatgtaaaacgccacgcatgccccgcccagcctgccttttaatcttcatctctggccacactcttctagcactgcctgtctgcccagctcccgcccatgcccccccgccccgcgcagccttctgtcctgtaaccaccttccccacaatatgccatcattccccctgttaatggctctgcccttgcccactgtcctatcctggaatgactttccctcatccttctttcttctaatgacctcctattcatccctcaaaacccagtgcaaaggatcccatgatctcctgccttcaggcaaaatgactcaccttcctcctcaggccaccccagctcccactattggcgatcccatcatcctttgctaacacaccacctcctggatcacctgggctcctctggactggagatctcctctcaaacaccgcatcatcagtcccacaacaaaatgtgttctaacttttcttttttttttttttttttttgagatggagtctcaccctgtcacccagactggagtgcagtggcaggatctcggctcactgcagtctccacctcccaggttcaagcaattctcctgcctcagcctcccaagaagctgggattacaggcacacaccaccacacccagctactttttgtatttgtagcagagatggggtttcaccatgttggccaggctgatctcaaactcctgatctcaagtaatccgcccatcttggcctcccaaagtgctgggattacagtcataagctaccccaccaggctgttttaacttttctaaacagatgtgtaaataatttttttttggaaacatggctcatgggtcatcagtgactgtctggacagctcagggattaatagccgggaggagctaagccccagttcctcctcgttccattgtgctggggtttcatggattattactgagcccatttgcacggtccggtctgcgttcaggagaatattgtcccatctatcttcagttagctgtttgagtattcgggttgggtgtgagggagctaacagttggccccttgctctgttctcagattcttgaggtttatttcccccttgaattgtcccaacagtcctgtgaggtggatgtcatttattacttctgcacagatgactaaacaatctcaggggagcctggtcattaattggccatgatcaaaaaggtagtgaaagcacatggcagcactttgggaggccgaggcgagcggatcacttgaggccaggagtttgagaccagcctggccaacatagtgaaaatccttctctactacaagtagaaaaaattagccgggcgtggtaatgcatggccgtaatcccagctactcgggaggctgaggcacgagaatcacttgaaccaacccaggaggcagaggttgcaatgagccgagatcgcgccactgcactctagcctgggtgacagggcgagagactctatctcaaaaaaaaaaaaaaaagcacgtggcagaataagattcaaacccgtgttccacctgatgccaaagcctgtgttttggaaaagaaatgtcatgtatcaagatacccctaattctacagcccgcatccctacacttgggaaaggaaacagaggaagtcgatctagtattgatagaagcgagctgtgtgttctagtggctctagtagaagtgaacccagaagtggatctcatagaagcaagccatgtgaaaactgacacactattgatttggggtggcatcaaaaatggtggccctccactttgaggtttttatgttatttacttatttatttatttctgagatggagttttgctatttttgcccaggctggacagtgcaatggcgtgatctcggctgaccgcaacctccacctcccgggttcaagcgattctcctgcctcagcctcccgagtagctgggattacaggcgcccaccaccacgcccggctaattttgtatatttagtagagaaagggtttctccatgttggtcaggctggtctcgaactcccgacctcaggtgatccgcctgtctcagcctcccagagtgctgggattacaagcatgagccaccaccccaggccggagtttctttcttgagctagattttcttgcaaggttacacttattagcaaagtccttgggaaaagcaatttggtaatgcaagtctaaacatcagaaaggatttgtaacctttgcgtccaaaatctcgtctcacggaggctcttgtatgaaattggaatgcctcgaatgtctaacagcagggaaacgattaaagcgatacttacaaagtctatagcaacgtgaaatacttgtgtgttccctgcaactataactgaacatgtacacccgtgtcaataaagatgggggcacagagacatttgtaagtgatggtaagagtgctggtcgattttaatttaattttaaattttagttcactcttgtactattcattaagaaggctcaaatttagactgggcgcggtggctcacgcctgtaatcccagcactttgggaggccgaggcgggcggatcacgagttcaggagatcgggaccatcctggccaacatggtgaaacctcatctctactaaaaatacaaaaatttgccaggcatggtggcaggtgcctgtaatcccagctacttgggtggctgaggcaggagaatcgctggaacccgggaggcagaggttgcagtgagccgagatcacgccactgcactccagcctggtgacagagtgagactacgtctcggggaaaaaaaaaaaaaaggctcaaattcaggtaacagtgctataggtgatatttcttcatgagcccttatcagtatttcccgagagccatttcttatcagccaggaatctttgcagatgaagagtttgtaccacatttgtacttttttaagaccatgacatgcagccaactggttttatgcccaagaatgttccactttgttccgccctttttttttctaatgcccctaaggtgactcacctatagcagtttaccttagttcttatcttcattaaacaagagtagggctctggcttggtcttacacatttagagaaatgcgttctacatcaatggaaaaaaggtgggggtctccccctacttccccacaaaaaaaacaaacttttgaagttaaagcttattaagaatgggccgggcacagtggttcacgcctgtaatcccagcaattggagagggtgaggcgggcggatcacgaggtcaggagttcaagaccagcctggccaacatggtgacaccccgtctctactaaaaatacaaaaattagccaggcatggtggcgggtgcctgtaatcccagctactcaggagactgaggcaggagaattgcttgaacctgggaggtggacgttgcagtgagctgagatagcgccactgcactccagcccgggtgacagagtgagactccgtctcaaaaaaaaaaaaaaaagcttattaagaattatgagaggccgggcacagtggctcatgcctgtaatctcagcactttgggagaccaaggcaggagaatcgcttgaggttaggagttcaagaccagcctgggcaacatagcaacaccctgtctctacaaaaaacataaaaattagccagacatattggtgtgtgcccgtagtcccagctactcaggaggctgaggcaggaggattgtttgaactcaggagttcgaggctacagtgacctatgaatgcaccactgcactccagcctgggcaacagagtgagaccctgtctcaaaaataaaataaaataagaaaataggaaattagccaggcttggtggcacatgcctatagtcccagctacttgggaggctgaggcaggaggatggctagagcctagcagttggagactgtggtgagccatgactgcaccactgcactctaacctggtcaacagagcaagaccctgtctcaaaaaagaaaaaaagcagcaaagaataacctgggcgcggtggctcatgcctgtaatcccaacactttgggaggctgaggcgggtggatcacctgaggttaggagttggagaccagcctggccaacatgatgaaacctgtctctactaaaaatagaaaaattagccgggcgtggtggaacgtgcctgtcgtcccggctactcaggaggctgaggcaggataattgcttgaacctgggaggcagaggttgcagtgagctgagattgcgccagcacactccagcctgggcgacaaagtgagactctgtctcaaaaaaaaaaaaaaaagaaaaaaagcaccaaagaatgatgagaatttactcttaggtagtacaccagacacctaatcgacgtctagtgatttgggcaccagaatctagctctctgcctgcctttcccacctccacctcagttttccccttatgcaaaatcacgtagtattttcctatgtcacagaaatgccgctgccgtggctgagagaacgtttgctcagaatggaatgcttccaccaggataaaggccttaggatgtggatatttccagctagcagcaagtgtgttttgtactgtgaagcatcccttacttttaggacgagactggtcccaggaggaaaagtggcgtcgattggtttccatggagaatgcagtttctcactgtggactcttgagttcttagttatgctgtcaaatattctaaaatcataggtcacctcgccgtgttgaaaggttctacagagccttctgagtctcagagaaagttaagtttgaattcttggggtggaggagccgaggtcaggcactttggggttagaggtgaccctggcctcctttttccctctcgtaagctcgaggtggggaaaacccagaacccccactgcaggcaagaatgtggttccatctggcctttttgctgtcgcagaacctgccaggaaaggcgcacacaggatgttttagggcccaattcaccgcaggctcctggagagcccccagtgaagaaatgagtctcactgaggtcaaatgttgccccagctgcctcactttcgcaaggtgggcccaacggcaagtgtgtctacccagtaccctggaggggggatgtctgtgggcttcatgtgtccaggcattgtccagaaaaaaagggctgtcttggccaggcatggtggctctcgcctgtaatcccagcactttgggaggccgaggtgggaggattgcctgagcgcaggaaggagttcaagatctgcctgggcaacatagcaagaccgtgtctctacagaaaatacaaaaatcagccgagtgtgggagtgtctgcctgtagttccagctacttgggaggttgaggtgggaggatcactggagcccaggaggtcaaggctgcagtgagctatgatcacgccactgcactccaacctggatgacagagggagaccctgtctctaaaaaaaaaaaaaaagaaggccgggcgcagtggctcacacctgtaaccccagcactttgggaggctgaggcaggcagatttcttgagctcaggaattcaacaccagcctgagaaacatggtgaaaccctgtctctactaaaaatacaaaaattagccaggtgtgttggcacacgcctgtaatcccagctacttgggaggccgaagcacaagaattggtcgaatctgggaggcagtctgcagtgagccaagatcgtgccactgtactccagcctggatgacagagtgagactctgtctcaaaaaagaaaaaagaaaaagagggagagaaaaaaatgaaaatcacctctcttttaaaggaatagaataagagtaacagagtcaaatctctgggcaaacatgtacagaacttaaataaacagtaagaagaataagatgataaaaccagaaagtagctcaacagttaattcctgcggtcatgttgagaatgtgtaaggattttcatgtttatgtgaaactgaatgggggtgggtggtagctaagtcgaagagtcatacaattccacttaagaaatagcagtgcttaaaatgcattttttcaggcagtttttaactcaattttcttgggtaagtaacccttggctttgcgaggtagtttgtgttcccatctgtcgggccaggcgcccacttgcttcctggctatggccttccttcaccttccagcagaacctggtgagcccacggcctgttgcatggagattttctttcttctgaaatggactctcacttctctcaagctggagtgcagtggtgcgatcatagctcactgtagcctcgaactcctggcctccagtgatcttcccaccttggccttctgaagagatttttttttttaagtggaacttaaaatcccaccaaagataatggccctgaaggtggctgttgtctttaatggttcagaaggctgaggcaggaggatcacttgagcccaggagtgggaggctgcagcgagctatgaccacgccactgcactccagcctgggcaacagagtgaaactgtgtcgaaaaaacgaaagtgaaatggccaagaaagagattaccctgggcccctgcaggtcgaacctttgggtgccctccctgatctctctcctaactgtgctccccgccctgcccgactgcatccttcgccacagggccgtggtagcctgcatggctgtgtgctcgtgccgcaatgggctgagcacgtagatctgatgtgacaccagtgcctggagatgaacagcacctgacccttgctcccagggaggtcaaggtgcagcgaggctgtgcaataaagtcgggagtgtggtgagctgtaaaggaagcccgcaggcctaggccacgggcccgagggcaggggcacgccatgcagaaggactctgacccggccccacagctggccagataagagagacgccttgagtcgaggggccgggggctctgaggctcccccctggtatggcatgtcagcgtagttggggtatagggtacaaaatgtggcaagaggtgaggccagagagggtctggaccctgtagatggggcgggatgagaatgggtgagtctggatgggcagccacccacggcgatctcagcctgggctaagtgaccagtgggcagccccaaagcccgttaaacagaaggccaggtgtggcggctcatgcctgtaatcccagcactttaggaggccaaggcaggcagatcacttgaggtcaggcttttgagaccagcttggccaacgtggtgaaacctcatctctactaaaaataccaaaattacctaggtgtggtggcaggcgcctgtaatcccagctactcgggaggcttaggcgggagaattgcttgaacccgggaggcggaggttgcagtgagctgagatcacaccactgcactccagcctgggcaacagagtgagactccgtctcaaaaataaataaataaataaaaataaacaggcagaaggcagaactgtggccgattggatttcagggtgcaagagaagtcatcatcccacagacgccccccaagctggggctcatgtccctggcacagagagagggcccacacccataagaggaggctctagaagatcccacaagaggggcccagagggcagtggcatgcatgccacggagagggtgctgtctcctggccagtgagttctggttctttcttaaatcagagcgctcccgtgcatatgccttagcaaaatctctgctgtgtttaacaagcctcagtgcatcctggaagtactttttttttttaaatcgacttgtgcctcaatatactttttttttttttaaggaaactattgcttgggaataattttcagtttacagaaaaattgcatagatagaaaagagaatattcatggtacccacacccagtttccccgcacattaataactgatgactaaactcccaggctttatccaaatttcacctatttttctgctccagaatccagctcaggctcccacattgcacttggtggatttaacttttgagatacttccctgtcattttttatttttctttaaaagaaatgaaggccggctctgtcacccaggctggagtgcagtggcatgatcatggctcactgcagcctcaaggtcccaggctcaagcgatccttctgcctcagcctcccgagtgctcaggactacaggcatacactaccatgcctggctaattttttttttttttttgacagatgaagtctcaccatgttggccaggctggcctcaaactcttgaccttaagtgatcctcccgcctcagccctgcaaagtgctggaattacaggcatgagccactgtacccaaatacacagctcccaaaattaacacaggccaggcatggtgttgcctgtaatcgcagcactttgggaggctgaggtgggaggacagctaaagcctggagttcgagatcagccttggtaacatagggagaccctatctctataaaaatatctaaaaaattagctgggcatggtggtatgcgcctatagtcccagccacttgggaagctgaggccagaggactgcttgagcccaggaattcgtaactgcggtaagctaagtctgtgccactgtactccagcctgggtgacagagcgagaccctctcttcaaataaataagtaaataaaatagaacaataatgcccacatccatagacaataaataaatataccaaccatcctcaacctaaatgttatacttcataacaaaaatgaactccagcactttgggaggccaaggcaaaagcatcacttgagtccaggagttcgagaccagcctttgcaacatagccagatcccatctctaaattagccaggtgtgatagcacacacctatggtcccagctattcgggaggctgaggtgggaggatcactcgagacaaggaggttgaggctgcagtgagccgtgatcgtgcctgtgtactatagccagggcgacagagtgagaccctgtttcaaaacataaaaagataaaataacagtagtacctacttttgagtcattgtgaggactgcaggacttaagaaatattaagtgaggccgggcacggtggctcacccctgtaatcctggcactttgagaggccgaggtgggcggatcacttgaggtcaggcattcgaaaccagcctggccaacatggtaaaaccccgtctctactaaaaatataaaaattagctgggcatggatgtgggcggccataatcccagctactcaggaggttgaggcaggggaatcgcttgggaggcggaggttgcagtgagtcaagatcgtgccactgcactccagcctggacgacagagtgagactccatctcaaaaaaaaaaaaaaaaaaaaaaaggccgggctcagtggctcacgcctttaatcccagcactttgggagtccaaggcgggtggatcacctgaggtcgggagtttgagaccagcctgaccaacatggcgaaaccccgtctctactaaaaatacaaaattagcgggcgtggcggcgcatgcctgtaatcccagctactcgggaggctgaggcagaagaatcgcttgaacccaggaggcggaggttgcggtgagccgagattgcgccattgtgctccagcctgggcaacaagagcgaaactccagctcaaacaaaagaaatactaagtcctcaggacacagcctggaatgcaagaagcactcaataaatagtacctgttgctacgaattaccacatttttttaaatggtattttgggggtttgacgtgtagtttggggtaggaggcttttcgttttgttttttgtttttggatagtaccaggtttgggaagaatattctgagtcatacttaccttctaagctgcaagatgtcttttttaatttttctttgtcccctgaggtgcgggatgaaggggtttttttcttcctcctacctttttattctttttaatactgtcttgcttgtgtaacatcaaaatgaggcaagaaagagaaatcaatgaagtcatcttctcatcgatttagtctattcccaggtggccgaaaaggcaggaactgtgaactgaaaacttcatctggcatcagattttctttaattgtctctcgaacactcaccagtaagccagtgcttgctagaactctctagagccaggttgcactctcagcctaaaagaaaagtcttggctgaaacaaagaacagaaggatgggtggggacagaaaacctccctaaatgtgagaaaaggagtcattatttctgagaccaggccttgaaaccgaggtgcttgtctggttcacttgtttctttctttttgtttttgttttgttcagagacagggtctcactacgtcgcccaggctggaatacagtggtgccatcatagctcactgcagtctcgacctgctgggctcaagggatcctcctgcctcagcctcccaaagtactcagattacagacttgagccaccactcccagccctgtttgtttcttgaatagtcctttgcagaaaactggagacttatggactagggcccagctgccttcaaaagatgtttggggtccctttacaagtgagaggctatataggaatctgcaatttaagacaggcaattcttgcttacaaattggcatttctggaagtcagtgtgcctctagattatttataaaggacagtttgaaaccaattaagacagtcacttaatatgtcatatcaggtccgggtacactggcccatgcctataatcccagcactttgggaagtcgaagcgggaggatcacttaaggctaggtattcaagaccagcctgggcgacataatgagacccccgttgctacagaaaaattttaaattagctgggcatggtatcacacacctgtaatcctagctactcaggaggctgaggctggaggatcccttgagcccaggaattggaggcttcagtgagctgtgatcatgccactgtactctagcctagatgatggagcgagaatgtgtctctctttaaaaaaaaaaaagaaggcaggccgggcacggtggctcacacctgtaatcccagcactttgggaggccaaggcgggtggatcacctgaggtcaggagtttgagaccagcctggccaacatagtgaaaccccgtctctactaaaaatacaaaaattagctgggtgtggttggacacacctgtagtcccagctactcgggaggctgaggcaggagaatcacttgaacccaggaggcggggttgcagtgagccaagattgcaccactgcagggaggcggaggttgcagtgagccaagatcatgccactgcattccagcctgggtgacagagcaagactccgtctccaaaaaaaaaaaaaaaaaaaaaaaaagtgtatcaggttttcttggacatcactttgaacaggctagtaactactcagccgttttcatgtaatttttggtgagtcctgttcctgtaagacctaataaggagtgtgcttggctgtcagaggacaaagcctgtggcttacaggatttatgagagactgagtcacaaaggaagcacagcggcactggaaaaagtctggggtcttaggctgggtgcggtggctcaggcctgtaatcccaacactttggaaggccgaggcaggcgaatcacttgaggccaggagtttgagaccagcttggccaacgtggagaaaccctatctctactaaaaatacaaaaatagccaggcatggtggcaggcacctgtaattccagctactcgaggggctgaggcaggagaatcacttgaacctaggaggcggaggttgcagtgaactgacatcacaccactgcactccaacctgggcgacagagtgagatctgtctcattaaaaaaaaaaaaaaaaagaaaaaaaaagtatggagtcttttgtcccagtaaagtaatgcaggtgggatcctgacacctgttacgaaagctttgtcatctaacttgctcagagattgctcttgttttagtgttttttaaaaaaacaaaaaatttatagagacagggtctatgttgcccaggctggtctcgaacacctagcctcaagcgatcctcccacctcagcctcccgaagtgctgggattacaggcatgagccactgtgcctggccagggactactcttgaattcatgaaaccaagacaaaaccaacttttaaaaatcaccctgaggataggccactgtctgtgtttgttgctgagaatagggtatattttttccccctcaggtcagaactgttttgattttcaccgttcacctctttccatccatcctccaggtccccttgcagaaagagctctgcggcatacagtggccacagcgggccaggtgctcactaatcgatcgcacctctcagcagtgggcaggaggcgctaattagactctgagtagcttttgcagctgcacagaaagtgctggacagcacaagctgaaccccaagcaccatggccgtctgctgtaggaaaaaccgtagcaggagataaatatgtatccctgtctctctcggagccaagagcagagcgactaattcccaccatatgttgagctgcaaatcagatgttttgctctcctcccacagaaagaagcctgtccatcacaggtgtgagtttgttggttgagcaggtttattgagacgtaattcacagaccatacaatgcacccatttaagagtacaacccaggggcttttagtatattcagagtcaccgaaatggatcttagaaccccaaaaagaaacaccataggccaggcgcagtggctcacgcctgtaatcccagcactttgggaggccaaggcgggcggatcacctgcggtcaagagtttgagaccagcttagccaatgtggcaaaaccccatctctactaaaaatacaaaaattagctgggcgtggtggcaggcacctgtaatcccagctactcgggaggctgaggcagaatgacttgaacctgggaggtggaggttgcagtgagccgagatcaccctcactgttttccagcctgagtgacagagcgagactccatctcaaaaaaaaaaaggcgtcagaagatctgaggctctcccatccctggcaagcagacttctggcctctgggcagctggtgttttagggtacccaggatttgtcttaacccagtatggtgagactcacagacccagaaatgaccgtcaggaaggaagaagtttatattcacagtcctctggaagcaggaggcagggcacaccacacaggggccacatggggaagcaccagggtcagttgagggacagaggggaaaatatggacaggagtcttcattgtggtttcccggggaacaaatgggccaggcagggtgagcaggttcaggatggggccccgaggtgatgagggcagcgggaccgtggccaggagtgtgagagccccataaaggaggcaactgggggtctgagctctgcactgggtgcagaccctttactgtctctagaaactggcctgggaggggctgtgcatccatggtcagcaaagccccaagatgtcagagcatcacaaatccggaataaaaggacataatcaatacagcgggtctgtggcagggccactgactcatgtcttgacccatcagctatttcagtggccgcatgtgttccaggaagactcaatttatgactgtccacctcttattctatttcatttcattctttttcagagtcttgctctgtcacccaggctggagtgcagtggggcagtcatagctcaccacagccctgaaccccagggctcaagcaattttcccacctcagcctcccaggtagctggaactactggcacacaccaacatgcctgcctaattttttgttgttgttttttaagagacgagatctcactgtgttgcccagactggtctctaacctgctgtccctggtcatgaccccaacatgtgaaaacttcagtgtcttctaaatcatcaaaggagggtttacatatattcccatagatttagcattaccaatagtttattaaaattctttggaatcagcatttcttctttttttttttttttttttgccatcaacttgattttgggaattggcattgcttacatgctgttttttttgtttggttttttggttttagtttttttcaagacaggatctcactctgctgcccaggctggagtgcagtggcatgatctcggcttaccacaacctctgcctcccaggctccagcaattctcctgcctcagccttctgagtagctgtgattacaggtgtgcaccaccactgccaagctaatttttgtatttttagtagagacaggttttccccatgttggccaggctggtcttgaactcctgacctcaaatgatccaccccgctcggcctcccaaagtgctgggattacaggtgtgagccacaacacccagccagatgctatttttagtgactttttcttctatggactattgtattagagcagaattaatctgatttcagtcaagacctcagtccacaagcaaccatctgtcagccctgccaggatgctgctgggcaaaggatacatctcgggatttgcgccatatttgtacgtttaggtcataattgcctgggtggagttgagtgttgtacagaaatggcaagaaatgcctgtcctggaccgtgtcgcctttggtttaggattcctgtttttttacataggtgttgctttgtgagtgacatcttcaattgctttgtctcctataacaatagtaattgttagtcatgtgttatgacgtcagaatgtttctggcctctgaacaaatgtcatctttgctgtgctgggctgtggaaagaatgaacagctactgagtatatgtgcaatgtgctgttacacagcttagtggctgatgtcttaattggcaagaattcttgactcctctgccagaaaatctctaacacacactcacctgctcgttaacaatcaccttcaatttacagctaaattaaaagttgctcagaggccggctacggtggctcaagcctgtaatcccagcacttagggaggccgaggtgggtggatcacctgaagttgggagttcgagaccagcctgaccaacatggagaaactccgtctctactaaaaatacaaaattagccgggtgtggtggcacatgcctgtaatcccagctactcgggaggcaggagaatcgcttgaacctgggaggcagaggttgcggtgagctgagatcacgccattgcactccagcctgggcaacaaaagcggaaatccgtctcaaaaaaaaaaaaaaaaagttgctcagagaatgctgaatcctctcccaggagagctgctgcgagtacgttttccctagggtaagctctgcccaccccatggtttataactccgtgttcccaagaaagagacttctagctgctctcttcctgtaacatagacaaggcaatggtgtatcgggacctaggagccaggaggccacaggacagatcagatttcttttttttttctttttttttgtgagatggagtctcactttgttgttcaggctggagtgcggtggcatgatgtcagctcacggcaacctctgcctcccgggttcaagcgattctcctgcctcagcctcccgagtagctgggattacaggtgcccgccaccatgcccagctaattttgtatttttagtagagatggggtttcatcatgttggccaggctggtctcaaaatcctgacctcaggtgatccacccgcgtcggccttccaaagtgctgggattacaggcatgagccactgcacctgatctgacaaatcagatttctatttctcttctctaagctcctctcctctcctctctcctcccctcccctcccctcccctcccttcccttcccctctcctcttctctcctctcttctctcttctcttctcccctcccctcccctcccttcccctctcctcccttctcctcccctcttcttttcgagaaggtcccgctctgtcacccaggctggagtgcagtggcacaatcatagctcactgcagccttgaactcctgggctcaagcaatcctactgcctcagcctcccgagtagctgagactacaggcgtgcgccacttgtgctcagctatttttttattttgtgtagagacggggtcttgctatgtttcccaggctggttttgaactcctggcctcaagcgatccttccacctctacctcccaaactgctaggattacaggcgtgagccaccatgtctggcccagatttcttttttttttttttatttttgagacagagtttcactcttgttgcccaggctggagtgcagtggcacggtctcggctcaccacaacctccacctccggggttcaaacgattctcctgcctcagcctccctagtagctggttttacaggcatgtgccaccatgcctggctaattttgtatttttagtagagatggggtttctccatgttggctaggctagtcttgaactccccatctcaggtgatccacccaccttggcctcccaaagtgctgggattacaggcatgagccaccgtgtccggccgccagatttctttttaatgctgctctttgtccttacctgggcaaagctttaagatacaattttataaaatgtaagagtaaactagccaagtagcccatctcaactatgcttgtcaaataggaggggaaaactgaacctaatgaatgatggttgagctttatttattatttgtttattttttaggcggagtctcactctgtcgcccaggctggagtgcagtggcgcaatctccgctcactgcaacctccgactcccgggttcaagcgattccgtgcctcagcctcccgagtagctgagattacaggcatccaccaccacgcccttctaatttttgtattttgtattttttattttttttaagtagagacgggggtttcctggccaggctggtcttgaactcctgaccttgtgatcaacccacctcggcctcccaaagtgctgagattacaggcgtgagccaccgcacccggccatagttgagctttattaagtgttgcatcttgggaggcccaaagcaggaggaccgcttgaagtcaggagttcaagaccagcctgagcaacatagtgagacccccccccaacctctacaagaaaatatttttaaattatacagcacacctgtagtcccagctactcaggagactgaggcagaaggattgcttgaacctaggagtttaaggctgcagtgagctatggtcggccactgcactccagcctgagctagagtgagactgtctctaaaaataataataattaatttaaaaagttgcatctttccatgagtaggtgagcttgtcagcgggcacacgtatcctatgatctgaacccttaaattaatgaacagatgggtgtagacagcggtttgcagcccctgttgatgttgggttggtttataatcaccatatggaacagaatcggagcctcgcgtccacttcgatgctagaattctgttcgagtgctgatgaccaggggcggctaaacaccatgccctgccatctctgggtcttagagtcaccctaacatctgatctagattaattatcatcatgtgcgaggttttggcatgaagcacgccaggctcaccgtttcatgatcttagactatttacagcaaactcaaacagctcacttgctttttacaccctgcaaagaccaagggagagcctggaggggttgttttttttttctgttttattctatcaaagcagcaaatactgcaatttccacagtaaatggtcacagtggggaccaatatcctgccctccagacccgctgcttcagccaatacagcaagggaagacgcagctctgttttctagaaggatcccaccgaggcataaaaacggcgcagcccagcctggcgccgcgccgggtcccggagccccgggcgcgaacatggggaatgcgcactccaaaagcggggacaggcacagcgcgctccccggccgccccgagctgtctttttacggctctttccccaggaaatggagcgagaacgtcttcttggataacgagctgctgacctccaagatcctgtctgtgctgcggccgcagtcggagcggggcttccgcgccggggacctccgctacccgacccactttctcagcaccaactctgtccttgcctctgtcacagcctcgctcaaggagcacccccggggcaccctcctgtccgatggcagcccggccctgtccaggaatgtcggtatgacggtctctcagaaagggggtccccagccaacaccgagcccggctggccctgggacgcaactcgggtaagccagggtcccctctgtgccctcgggtgggtggtggcattccccggggagctgttgacagcctcttcggagggagaccccgacttagatctgtgtgaatccacacggcagcccccgtgctaagcagagaaattcccattaacgcttgcttccaggatccacgccttttttgcaaaaacgatgtgtcccggggtgtattcggcccctggtggagccagtttgcttagtgccctcgagggatccttggactcgctccttaggccgggctcctgacttactcaaggcgatgctcaaagtcctgctgggtgtgtggaggcggcgtcccattatctgtgccttacctcgttttataggacttcaaagtggttcccttgataatgcctgcagcggtgtccgggtagaaagtgatgctagaagctgatatgtttgtggtgactattccatgagttcgtgggaaagggagtaaattatcattttcctctgagtaaggactgccctcccaccttgaccatgaaaccatttccacttaactcctggtagacaggatcccaggggccccaagtgggctccagtggtctgtcaaggaagctgcaatccacaccccgttagaacgtaactaaacattaaaggaagttactatggaagaaatcctgatgtgacattgacagataatcttccccaccccccgccccccaccacttttttttttttttctttagacagagtctctgtcgcccaggctggagttcagtggcacaatctcagctcactgcaacctccacctcccagattcaagtgattcccctacctcagcctcccaagtagctgggattacaggcacctgccaccacacccggctaatttttgtatttttagcagagacgggattttgccatgttgggcgagctggtctcgaactcctgacctcaggtgatcctcctggctttggcctcccaaagtctgggattacaggcgtgagacactgcacctggcaaatctcccaatttttaaaaatgatctgtagacaaagttgaggcttctgtgaaaatgtggagagttctcagagagtatcgaatcggatggagtcaccgatgtgcctttgttgcatgaggtcgtgtgtgtttaattcacttttctaaaacaattgtttttattgtttgcactcagaccaatcacaggagagatggatgaagccgattctgcgtttttaaaatttaagcagacagctgatgactctctgtcccttacatctccaaacaccgagtccatttttgtagaaggtatggtcatctccgctctctcgcggctgccacacagttcctgtctctcctgggaagagctggggctcgtgtcagcatgtctacgggagggaattggggtggcatggctctgggcccccagcagccacacctcgctcttccctcagatccctacaccgcctcgctgaggagtgagattgagtcagacggccacgagtttgaagctgagtcctggagcctcgccgtggatgcagcctacgccaagaagcaaaagagggaggtggtgaaaagacaagatgtcctttatggtgaggagtccacagccctgtgccatcacaccggccctccactctcttctctgctccctcccttcctccctcccttccttccttccttccttccttccttccttccttccttccttccttatctttttctttctttctttctctctttccttctctcttttgtcctctttctctctttctttctttcttttttttcttttttgagacacagtctctctctattgcccaggctggagtacagtgggacaatcagagctcactgcagcctcgacctgggctcaaacaatcctcccacctcagcctccctagtagctgggaccacaggcatgggccactacacctggcgaatttttttattttctgtagagttgggggtctcaccatgttgcccaggctggtctcaatctcctgagctcaagtgacccgcccgcctgggcctcccaaactattgggattataggcgtgagccacggtgcctggcctctctctgtctttctctctcctctcttggtgcagccctgcctcccatgccaggaaagagactgtcggagaggattttgttataatacgtccctgtgaacatgtctggctgaatgcccaggtctggcttcttcttcccttgttggtggctgtcttagcctatataggcagctctcatagaacaccatacacagggtggcttagaagccacagaagtttattgcttacagttctagaggctgggacgtctaagaccaaggcggcggcagacttagtgtccatgaaggccccatttcctggcttcctgctggtggcatctggctgtgtcctcacaaggtcttcatggtctttctcaggtcctcttttttctttttttgagacagggtcttactctgtcacccaggctggatgcagtgatgcagtctcagctccctgcaacctccacctcccaggttcaagcaattgtcctgcctcagcctcccgagtagctgagatgacagtgcctgccaccatgcccagctaatttttttttttttttttttttttttgagatggagtctcgctctgtcgcccaggctggagtgcagtggttccatctcggctcacctccacctcccgggttcaagcaattctcctgcctcagccttccaaatagctggaattacaggcgcccactgccacgcccagctaatttttgtatttttagtagaggcggtgtttcaccatgttggtcaggctagtctcggactcctgacctcatgatcctcccaccttggcctcccaaaatgctaggattacaggcgtcagccaccatgcccggccatgcccggctcatttttttattttttggtagagacagggtttcgctgtgttggctaggctagtctcgaactcctgacctcatgtgatctgctcacctcggcctcccagagtgctgggattacagacgtgagccaccacccttggccctcaggtccttttcctaagggcaccagtcccaccatgaggttctctccccttaggacctcatcaccttccaagggctgtacctcctgatactatcacctttggggttcgaatttcgacatacgaattttgggggacgcaaacatcttgttcattgcagtctaggtctggtcagggacacacacagatgtgatggatgagttttaacagccacaggagtgttcctcagaacactcttcttcctaaaacagacttgatagccaggcgtggtggtgtgcacctgtaatcccagctacttgggaggctgaggcaggagaatcgcttgaacccgggaggcggaggttgcagtgagctgagattttgccactgcactccagcctgggcgacagagcaagactccatctcaaagaaaaaaaaaaaaacacggacttaaaatgtcgtccgttgggttgacactgggcgcaaaaccctcccgtgatggggaggcccagggttctctccttcccctgctccttcaggctgggatcccccgcagcattctaaaccctggacaccctggaagtaagaaagatcccaaaggcacaaggtcttaggcagagaactctcagaagccagttcagcacgtgaagggcaggcagcacccacgactgcccagcggggccgtggagccagcatggctaagtcctgccgtctgtgtccctgcagagctgatgcagacagaggtgcaccacgtgcggacgctcaagatcatgctgaaggtgtactccagggccctgcaggaggagctgcagttcagcagcaaggccattggccgcctcttcccatgcgctgacgacctgctggagacgcacagccacttcctcgctcggctcaaggagcgccgccaggagtccctggaggagggcagtgaccggaattatgtcatccagaaaatcggcgacctcctggttcagcaggtgggtgcagccgtgttcatctcaacagtcttcaaagcctctgccttgtctctgttcctttcttctttttttctgagatagggtcttgccgtgtcgcccaggctggagtgcagtggtgcagtcacagctcaatgcagcctcaacctctcaggctcaggtgatcctcccacctcagcctcccaagtagctgggactacagctatgcgccaccatacccggctaaattttattttttgtagagatgaggtctcactctatggcccaggctggtcttgaactcctgagctcaagtgatcctcctgcctcagccttccacgtagctgggactccagggaacaccatgcctggctaactttttattttttgaagagatggggtcttgctttgttgcccaggctagtctcaaattcctggcttaagcaatccccctgcctcggcatcccaaagtgcagggatcacaggcatgagccattgtgccagccttttcctttcagtaataaaacgagagtggcccctgaggacacacagttctgggccccttacagcgatgcctgcagttcatattctagaaacacagagacctaaattaggcagtgtccctggctgaacactattcaatgttacattcttctgtgctcttgtttggttggttggtttttggtttttggttcaagtcacttatgctttcaaccgttcaaagcttacctgttgactgagtgcagtggcccacacctgtaatcccagcactttgggaggccaagcaggtgaattgcttgagtccaggagttccagaccagcctgggcaacatagcaagaccccgtatctacaaaacatgaaaataaattagccagctgtggtggtgtatagctgtagtcccagctactcaggaggctgaggtgggaggatcacttgagcttgagaggtcaaggctgcaatgagctatgatcatgccactgccctccagcctgggcagcagagtaagaccccaatttgggagtgggggaaagcatacctgtgaaccagcaccaaccgtggtagtggtattaaccccaaatgatcaccctaggccaagatttacccaggggagctgtgcccttcatgtgacctcaaactatttgctcgaagcatcctgggccaactaattagaagaacactccttttgctttttatgtttctttttttgagacaaagtctcactctgtcgcccaggctggagtgcagtggtgcaatgtcggctcactgcaacctgcacctcccaggttcaagcaattctcatgcctcagcctcccgagtagctgggattacaggtgcctgccaccacacccggctaattttttttgtatttttagtagagacagggtttcaccatgttggccaggctggtcttgaactcttgacctcaggtgatccgcctgcctcagtctcccaaactgctgggattacgtatgtgagccactgcgcctggcctgctttttgtttctaacgtcctttggctgaaatttactttttttctcggctctcaggaagttgtacagcatctgtgatgcagcaaagccccgaagcagaaggtttttttatttcacctttatgacaccttgcgattagacaccccaaactgaagcatttctctgtttgaggacatattagaaaatggaactgcagccaggcactgtggctcacacctgtgaccccaacactttgggaggctgagtgggggtggatcacttgaggttatgagttcaaggccagcctgaccaacatggtcaggttagccaggtgtggtggtggcacctgtaatcccagctactcaggaggctgtggcaggagaatcactcagacccggaaggcagaggttgcagtgagccaagatcacaccactgccctccagcctgagccacagagcaagatgctgtctctaaaaaaaataaaagaaaatggaattgcaaataaatctaatatttattttagcagagtcagacaaattagatgaaaatatactttggctggccaggcgcggtggctcatgcctataatcccagcactttgggaagatgaggtgggtggatcaagaggtcaagagttcgagaccagcctgaccaacatggtgaaacctggtctctactaaaaatacaaaaattagcagggcatggtggcatgcccctgtaatctcagctactcaggaggctgaggcaggagaatcgcttgaccccgggaggtggaggttgcagtgagccaagatcacgccactgcactccagcctgggcaacagagtgagactctgtctaaaaaaaattagccaggcgtggtggcggcacctgtaatcccagctacttgggagactacagcaggagcatcgcttgatcccgggagacagaggttgcagtgagccaagatcgcgccattgctctttagcctgagccacagagcaagatgctgtctcaaaaaaaaaaaaaaaagaagaagaaagaaagaaaatggaattgcaaataaatctaatatttattttagcagactcagacgaattagatgaaaatactctttggcagttttcgtgtttaattaacatttccatccttttgtttatcagttttcaggtgaaaatggggagagaatgaaagaaaagtacggtgtgttttgtagtggccacaatgaagctgttagtcattacaagttgctgcttcagcaaaacaagaaatttcaaaacttgatcaaggtaaaaacaatttttttttttaatcaaaaacttatattctggccgggcgcagtggctcacgcctgtaatcccagcactttgggagtctgaggcgggcggatcacaaggccaggagatcgagaccgtcctggccaacatggtgaaaccccgtctctattaaaatacaaaaaattagcctggcatggtggcacgcacctgtaatcccagctacttgggaggctgaggcagaggaattgcttgaacccaggaagcaaaggttgcagtgagccgagatcgtgccactgccactgcactcgagcctggcaacagagcaagactctgtctcaaaaaaaacaaaaacaaaataacaaaaagcaaaaaaaaaaacttacattcttcactgtggggtttttccacagaattgtagagtcttgagacttgggaattaaaaggcatctgttatgtagcagtgatttttcaaggtttggtttgggttttaactacaaccccattcagaacacgtcagtgaaatcttacatagaatcctgagatgtaaaataaagcgggccagatgcaatgcctcacgctgtaaatccagcacttcgagaggccaaggcaggaggatcacttgaggccaggagttcgagaccagcctgggcaacatagcaagatcctgtctctaagaaaaatttaaaaattagccaggcatggtggtgcacacctgtaatcccagctactccagccgctaaggagggaaaatcagttgagctcaggagtttaagagcagcctgggcaacatagcaagatcccatctctattatataagatacatatgtatacacacacacatattaacaaaatcaatcaaagaaagcatatctagactttgttccttaccaggccacggtggcccctgagagacccctgcagctcagtatgggacctgctgaccaccactttgtgtcatcactgtttggatgacacaaagggtcgtttgaaggggctgccctgccccaggaactgggcctccagatccagcctgtcttgccttggggatgccgtctgtctcaaggagggttactccagatgggcacggtggctcacacctgtaatccctgtaactttgggaggccaaggcgggcagatcacctgaggtcagaagttcagtaccagcctgcccaacatggcgaaaccccgtctttactaaaaatacaaaaaattagccaggcgtaggccgggcacagtggctcatgcctgtaatcccagcattttgggaggccaaggcgggtggatcacgaggtcaggagatcgagaccatcctggctaacatggtgaaacctggtctctactaaaagtacaaaaaattagccaggcgtggtggtgggcgcctgtagtcccagctactcgggaggctgaggcagaagaatggtgtgaacccgggaggcggagcgtgcagtgagctgagatcgcaccactgcactccagcctgggcaacaagagcgaaactccgtctcaaaaaaatacaaaaaaaaaaaaggagggttactccaaacttttgtccccttgctggtccatgttcgcccccggagcgtgtagaatgatcttcctgcctcctttgtgtgagcgtgggtaggtgctcgaagcccagccggagtcagccaagtcaagggagaccccacctcccacgtcctagaaaccacacttggatgatggctagttggttctatcaacattcacctctttagaggccctaacactgctgattccacaagagctgcatcacctgtggcctggccaggacttggttctgcagtggcattctacacccagtggtccaaagttaggagtgacatgcgtttaaacttcattgcattataggtaggtaggaaagggggaggatcgttttggagccgcagttcctcaaagccaggagggggattccaatgaaacctccgtccacggactcttgcaaatcccacagcggctccgggcctcttcagtggctctctgcaagtgctggcatccctcaaatgcatacaagagcagcgggagcaaacaagcagaaaatgtgctatgctcccgagagagtgtcaggtgaccccttttggttcttagccagaggtgagcatcagaaagcacccaggctgggcgtggtggctcacgcttggaatcccagcacttttggggaggccaaggcaggcggatcacttgagcccaggagtttgagaccagtctggggaatatggcgaaacctcatctctactaaaactacaaaaattagccaggtgtggtggcgcacacctgtaatcccagctactcggaggctgagacaggagaatcgcttaaacttgggaggcggaggttgcagtgagctgagatcacacccagggacccattcaaaaggcacaggcccactctagttctggagggttccagcagtcatgggttagggggtgtgtgttcatgtgtacattgtgtgtgtggacagcttgacagatgatttccataataaccccctggctggttctcatttattttatttttttagagtcagggtcttgctctgtggcccaggctggagtgcaatggaagaatcatggctcactgcagcctcaaactcctgggctcaagcaaaacctcctgtctctgcttcctgaatagctgggactacaggagtgtgccaccatgcccagctaatattttaattttttgtagagatggggtcttgctgtgttgcccaggctggtctcaaactcctggtctcaagcattccttccaccttggcctcccaaagtgctgagattacaggcatgaaccaccacatctgtcctttggtggcctttgtatatacagcaggtgatccctgcgttcaggtatctggtgtctgtctcctccaaagtggcaaaggaaaggtcctggtgagctgagaaaggaaggagcccccagccttggcagccgattgttgacaaattgggcagaaaccgagatgttaatgcaggatcttgctgtccatttccgagatgttaatacgcaatcttgctgtccatttccgagctgttaatgcggtatctcgctttctgtttctgagatgttaatacaggctcttgctgtccatttccgagatgttaatatgggatcttgctttctgtttccatttccaagacgttaatacaggatcttgctgtccatttccaagatgttaatgcgggatcttgctgtccgtttctgagatgttaatacgggatcttgctgtccgtttccaagatgttaatgcgggatcttgctttccgtttccgtttccgagatgttaatacaggatcttgctttccgtttccgtttccgagatgttaatacgggatcttgctgtccatttccgagatgttaatacaggatcttgctttctgtttccatttccgaggtgtgaatgtcgatcttgctttctgtttccaagacattaatatgggatcttgctttccatttccatttccaagatgttaatacgggatcttgctgtccatttccgagatgttaatgcgggatcttgctgtccgtttccgagatgttaatgcaagatcttgctttccgtttccgagatgttaatgcgggatcttgctgtccgtttccacggtgttaatgcgggatcttgctttccgtttccgagatgttaatacggggtcttgctgtccgtttccgagatgttaatgcggcgtcttgctgtccgtttccgagatgttaatgcggggtcttgctgtacctttctgagatgttaatgcaggatcttgctgtccgtttccgagatgttaatgcgggatcttgctgtccgtttccgagatgttaatgcaggatcttgctgtccatttccgagatgttaatatgggatcttgctgtccatttccgagatgttaatgcgggatcttgctgtccgtttctgagatgttaatacaggatcttgctgtccgtttctgagatgttaatacaggatcttgctttctgtttcctagaaaattggcaacttctccatcgtgcggcggcttggcgtgcaggagtgcattctcctggttacacaacgcataaccaaatacccagtgctggtggagcgcatcatccagaacacggaaggtaggccttctccccactgccccgcccgcccgtgctgctgcagcacagggctctctccgtgtacccactccctatttgagcagcaaactgaataaattccctttgaaatccagtttgctgggtgctggggttccttccttttttttttttttttttttaagagacagagtctcactctgttgcccaggctggagtgtagtggtgaaatcatagctcattgcacagcctccaactctggggctcaagtggtccttctacctcagcctcccaagcacctgggactacaggcatacgccactacacacagttaattttttttaattttttttttagagatggggtctcgctgtgttacccaggctggtgtggaactcctgggttcaagtgatcctcccacctcggtctctccaaagtgctgggattacaggcatgagccatcacatctggcctgggtttttttgttttgttttgttttgagacagtcttgctgtgtccctcaggctggagtacagtggcacgatctcggctcactgcaacctccacttcccaggttcaagtgattctcctgcctcagactcccgagtagctaggactacaggcgcccaccaccacacctagctaactttgatatttgtagtagagatggggattcaccatgttgatcaggctggtcttaaactcctggcctcaaatgatccacccatgttggcctcccaaagtgctgggattacaggcatgagccaccatgccacgcccagcctggcctggggcttttgatacaagaaagatggggtggtcagcaccatgaaagcaggagccaggtctcatttgccaactgtttcccccagcccctagcacaggctgggccactgcaggccctcagtgttagtgtctgtggaaaggatgaatggatggagacggtgccctggtggttcaaacagacccagagatggcctctgtgtcacatgaccagggctgagcaagggatgtgtctggagccagggaggcagagaagggcgggcagtccagccaggagttctggcagccagggccgtgctgaccacagctctcgcttcaccactgaattcaggccgtgagaggatgaacaaatttccccactataaaagccacatccttggagtgggaagagccagatcccagtcacaacaggaggtggagggaatctaatttatttatttatttatttatttattgtaagatggagtttcactcttattgcccaggctagagtacagtggcatgatcttggctcactgcaacctctgcctcctgggttcaagtgattctcctgcctcagcctcccgagtagctgggattacaggcatgtgccaccacgcctggctaatttttatatttttagtagagacgaggtttcttcatgttggtcaggctggtcttgaactcccgacctcaggtgatctgcccgcctcagcctcccagagtgctgggattacaggcgtgagccaccatgcccagctgggagtcttttatgaagggattgggacagaggaaagttcgtttaccaagcagtagatggcagagctagtcatggcagttttgccacttgaattgcaccttagcttctgcattcgatagatgctctacctaggtaaaaattcagctctgggccaggcacagtggcttatgcctgtaatcccagcactttgggaggctgaggcaggcggatcacttgaagtcaggagtttgagaccagcctggccaacatagtgaaaccccgtctctactaaaaataccaaaaaaaatagctgggcatggtggcgggtgcctgtaatcccagctacttgggagactgaggcaggagaatcgcttgaacctgggagacaggttgcagtgagctgagattgcgccattgtactctagcctgggtgacagagccagactccgtccaccctaccctcccccccccaaaaaaaacctaaactctgacgtgttgcatttattttggagaactatttgcatctcaggagattacatttgggaagtgatcttgagggtcttctgagtggtggccttggagaacacacctcatagatcccacacgcccatacatagtgtgtccacacacctcatagatccacatgtccatacatagtgagtgtgtccacttctgttgtgttaaagtggaaaagaaagacgctaactctgctatgtgtggcagctggcactgaggactatgaagacctgacccaggccttgaacctcatcaaagatatcatctcacaagtggacgccaaggtcagtgagtgtgagaagggccagcgcctcagggagatcgcagggaagatggacctgaagtcttccagcaaactcaagaacgggctcaccttccgcaaggaagacatgcttcagcggcagctccacctggagggcatgctatgctggaagaccacatcagggcgcttgaaaggtaaaggcctgcccctgcccacctctagtgggtgccatcttggatcagtgggcactgtcttggagtggtgggcactgtcttagattagtggcaccatcttgtatcagtgggtaccatcttggagaggtggtcaccatcttggattggtgggtactctcttgattggtggcactatcctgtatcagtgggtaccattttggagtgttggttcccattttttattggtgggtgccatgttggattggtggcattatattggattggtgggtgctatcttgggttggtagcaccatcttgggagttgtgggtgccctcttagagtgatgggtgccatcttggatcagtgggcatcatcttggattggtaggtgccatatgggattagcagcaccatcttggagtggtggcaccatattggattggtgggtgccatcttgggagttgtgggcaccctcttggagtggtgggtgccatcttggatcagtggcaccatcttggtgggttccctcttgaatcagtgggcacaatttgggttggtgggtgccatcttggattggtggcacagtcttaggaatgatggcaccatcttagatcactgggtgcctcttggatcagtggcatagtcttggaaatagtgacatcctggatcagtgagtaccatcttggatcagtgagcaccatcttggaatggtggcatcatcttgatcagtgggctccctcttggatcagtggccaccattttgattggtgggtgccatctcggactggtggcatggtcttgggagtggtggcatcctctcagatcagtgggtgccctcttggatcagtgggcaccatcttggtttggtttggtgggtgtcaactgacacagagccactgaagtctggctacttcatggctgaagggaggttatgagctgagtcaggatgagcaaggcagctggggtgtagcataaaagagatggttgtatcaccgtcctcctcctctggtctttggaagggtgcagtacacaccaggagggcatgctgagttgttgacttcccaatggaaacccagggcattggtggcacatcgagacaccccaggtttgggcccagaattccaaacacgctcagctgcccatctgggcagtcatgggccagcctgcctgccatgggcccagccactgagaggcccccatgtggatagagaatacccccaggactgctgatcagcatccccaagcatcccactcgctgcccagggtgtgctccgagccctactttcaagacccatgttgcagttcagaccagagagtgctcaggattcattcctgggtttcctgttcatttttggagcctctagaaacatcccaagctatctattcacatcagcatctttaaggatcttgagggagtcattgaggtggccaaatgacagcacttgcccactcatcatttgagtaggcgtgtatttcgcagacaggtttagcgccttctgcctgccaggcgccgagttggatggtaggaatacaccccaccgggcaagacctggtgcctagccttttaaggcatcagtcactgggctgaaagagagaaacaagccaaaaaacggaaaaactagttagaagtccagcacatgctttaaggaagccagcaggctgcagtgtgagagaattagcaaaagcgtatctgacttagacaggggtgttggaagcagctccccaaaagtggcgttgcccttgaaacgcagctcaggatttgcatctatgtgcaggaagccttacagcacgagaggttcatacagggacaaggcgccaagggggactgaggggcacgaggggactgagaccacccctggcctgcatcgctgctgtggctcgggtcctggtgacccaggagcagggagaacagagagctccgttcacatctgagacatcagagggagagatgttgtattagtccgtgttcatgctgctgataaagacatacctgagactgggcaacttaccaaagaaagaggtttaatggacttaaacagttccacctgtgggggaaggcctcacaatcatggcagaaggcaggaggagcaagtcaagtcttacatggatggcagcaggcaaagagagagggagcttgtgcagggaaactcccccttataaaactgtcagatcttgtgagactcattcactatcacgagaacggcatggaaaagatctgcccccatgattcaattacctcccaccaggtccctcttacagcacgtgggaattcaagatgagatgtgggtggggacgcagccaaaccgtatcagattctcaaaggtcagacccagcaggtgttgttacagcaaagagaattgccgggcacagtggcctgacatgggcgggagccctggtttgagctctggacacggaagggacttagaggaggctccggctgctcgttggtgctgaaggttgagacctggaaaggtgatggggggtgcaggcaaggcagaaaggaaacttctaggcccaggcagaagcatcatgctgcttacaccttcctgggaagtggcatccgcgggggtggccagcaagacctcctggctatgggacttttaagatgcatccttccatgctgttttcccagatatcctggctatcctgctgaccgacgtacttttgctgctacaagaaaaagatcagaaatacgtctttgcttctgtggtatgtatcctgtctcttcagacgaagggtcggctgggtgctgtggctcacgtctataatcccagcactttgggaggccgaggtgggcagatcacttgaggtcaagagttgaagtccagcctggccaacatggtgaaacctcacctctactaaaaatacaaaaattagccgggcatggtggcccatgtctgtagtcccagctactcaggaggctgaggcaggataatcacctgaacccaggaggtgaaggttgcagtgagctgagattgtgccactgctctccagcaagactgcgccactgctctcccgcctgggcaacagagcgagactctatctcaaaacaaaaaaacaaaacaaacaaacaaaaaacagacgaagggccctgcttgctgtgaccttgttgggaggttggctgaaactgcccatggaaggggcacctgtgagttttccaggcccacatagctgggattacaggcgcccgccaccacgcctggctaattttttgtatttttagtagagacggggtttcaccatgttggccaggctggtctccatcttctaacctcaagtgatcctcccgccttggcctcccaaagtgatgggattacagtcgtgcgccaccgtgcccagctgctggtgtgttcttaaccagtgtatttgtttgctgaggctgctgtaaacaaagtaccatggactgggtggtttagaccacataaatttattgtctcatgtttctgcaggctgaaagtccaagatgaaggtatcagcagggttggtttcttctgaggccccttggcttgtaggcagccatgtgctcatctgttctctgtgtcctcgagtggccatccctctgtgtgtgcctctgtgctaatctcctcttgttagaaggatgccagtcagattggatttgggcccgcccatatgatctcattttgccataatcacctctctttttttttttttttttttttttttttgagacagtctcactctgtcgcccaggctggagtgtgcaatgacacaatctcgactcactgcaacctccacctcccgagttcaagtgattctcctgcctcagcctcctgagtagctgggattacaggcacctgccgccacacccggctactttttgtatttttagtagagatggggtttcaccatgttggccaggctggtcttgaactcctgaccttaagtgatctgcctgcctcagcctcccaaagtgctgggattacaggagtgagccaccacacccgcacattaatcacctctttaaaggccccatctccaaagacagccacattctgaggtgctagggctcaggacttcatatgaatttgtggggaacacagtgtagcccactctagccagttaaaatgtgcattttgctggtctgtggaagcattgtctcttgaaggatgcgtgacagactagaaataccggtggctctgggtggcctgaggcacaagacagagatgggtttatctgttgttatatactacataccgttgtatcttttgagctttctcgtgtgtatgtgcattgccgactatttaaaaaaaaatttttaagctgatgaaattgacacattatcgggatactaaggggcaagatggctcactcctgtcatctcagcactttgggaggccgagataggaggatcacttgagcctaggacttcaagaccagcctgggcaacatagtgagatcccatctctacaaaaaatacaaaaattagctgggcctggcggcacgtgcctataatcccagctactcaggaggctgaggtgggaggatcacttgagcccaggaggtcaaggctgcagggaacaatgattgcaccactgcactacagcctgggtgacagagcaagacctggcctccaagatagtttaaaaaaaaaaaaaaaaaaaaaaaggtttctaggatttcactgcaatagtatcttttttcccccagatggcaaaatatttccgctttgaattgtttgaaaagaaatgaggagcgtgacccccactcttagttcccctcaccaggcccttgacctccctgctgtttgggtgctgtggggtaaagggtgacctccccaatgccctctactcatgcaggactcaaagccacccgtcatctcgttacaaaagctcatcgtgagggaagtggccaacgaggagaaagcgatgtttctgatcagcgcctccttgcaagggccggagatgtatgaaatctacacgagctccaaagaggacaggaacgcctggatggcccacatccaaagggctgtggagaggtgaggagggcctgggggtctccccacccactgtgttccttccgctgattggtccacccttggcttcgaccgttggccatcagctgtgaccttgaactccctcatcccagcttgggacccatgacgccattccagctccttctgatgactcaacctgttggacgttgaggccaacgggcccagaaaggcagctgtaacctgggcctttctgcatgcgtgggccactgcacctgccatggcgggctctctgcattctagggccagatttgttggagcagggcatggcatcttgtccttcctccttgggccgagcacccctcagggcccagaaccagctggcttcccctccctctctttattttttatttttttgagacagagtcttgctctgtcacccaggctggagtgcagtgatgcaatctcggctcactgcagcctccgcctcccaggttcaaacgattctgctgcctcagcctccccgagtagctgggattacaggcgtgagccactgcgcccagcctattttgttttgttttgttttgttttttagagtctggctcttgctctatcacccaggctggagtgcgctggcacaatcatagcttattgcaacccaaactcctgggctcaagccatcctaccccctcggcctcccaagtagcttgaactacaggcatacaccaccacacccagctagattttttatttttgtagagatggggcctcactgtgttgcccaggctggtcttgaactcctggcctcaagccatcctcctgtcttggcctcccaaagtgttgggattacaggcgtgagccaccatgcctgtccactccctctcttgattcccggaggcttcctggtgccttaatctggttcagactcccccatccacagtagctgtagctctacggggcttgcagccacccacctgcacctggcaggtcctctgcaagcccgctgtcccctggactcctcctctaagtcacaggcaggcatgtaaagcctcttcctggttatgccctggcgctttggggcgggatgaatgtcagtggctctctctcttcccctcctcgtcctcctgcaccacgaacaagctaaatcactcccaaagtcagagacggtcgtggcggctggttctgcagaaccagcgtctgtgccgaggctggcctgcctgggaagcacagttacccacccgactcctctccctgcagctgccctgacgaggaggaggggcccttcagcctgcccgaagaggaaaggaaggtggtcgaggcccgcgccacgagactccgggactttcaaggtgagcgggagacagcgtctgggcacaccccttgtgtggtgagccctgggccctccatcaggactggccacagagggtgaactgccccccaggtgacccggtgttttcccgtgggctgtgccatgtcctgcagctctgtgaagcattagaacgggctgtgccatgacatagcgatctccagaggtcacttagccctttgggggtatgtgggagagggagggaggagagcccagaggacctgagccccttccagagccgaccacacagccacacacgccaccaccaccccatcctcgtgcagccaggagctcaacagggcatcccagtcccatacgaaggaatagcacagggtccccacagcctccttccagagcttcctcctccctgtttaattacacgattgagatgtaattcacacaccacagcactcaccctcccaagcgtggggttcaggggcatttcagtgcatttccaattatgcagccagaatcatgttaactttagaacatcccaccaccccagaaagaagccccgtcccccttaacagtcactccccaccccatgccccaaccctggcaacaggaatctacttcctgtccctgtagattggcctgccctggacattccacataaatggagtcacaccgcgcggccttttgggtctggctcctctcgaggtgtggtattaaggttcgcccgcgctcagtgagcactttgtcaagaacaattcctggtgccctgtagcctgcggcaagctcccttcttccctttcactgtctgtatttttttttattttatcttcttttttttttttaaacagagcctcgctctgtcaccaggctggaatgcagtggcgtgatctcggcttactgcaagctctgcctatcaggtccaagagattctcctccctcagcctcccgagtagctgggactataggcacccgccaccacgccccactaatttttgtgtttttagtagagatggggtttcaccatgttggccaggatggtctcaatctctcgacctcgtgatctgcctgcctcggcctcccaaagtgctgggattacaggcgtgagccaccgctcccggccctgtattattcatttctaaattggataatactcaaacaataagtggcctggtatggtggctcatgcctgtaatccctgcactttgggaggctgaggcagatggatcactggaagccaggagtttgagaccagcctggacaacatggcaaaaccctgtctctacaaaaaatttaaaaattaggctgggtgcggtggctcacgcctgtaatcccagcactttgggaggccaaagcaggtggatcatttgagatcaggagtttgagaccagcctggccaagatggcaaaaccccgtttctactaaaaatacaaaaaattagccaggcatggtggtgcgtgcctatagtcccagctactcgggaggctgaggcaggagaatcgcttgaacccgggaggtggaggttgcagtgagccgagattgtgccactgcactccagcctgggcgacagagcgagactccttctcaaaagaagaaggaaggaaagaaagaaagggaggatggaaaattcagttttctaaggctctaagttggtcccagactaataaatgggcctgatacaatcctcactcacaccctactgtgtttgattttattttatttcttttagagacaggatcttgctttgttggccaggctggagtacagtactgcagtcatagctcactgcagccttgaactcctgggctcaagcgatcctcctgcctcatttcccaggcatgcaccaccacaaccagctaattttttatttgtagagacagagtctcattatgttgtccaggctggtctcgaactccaggccgcaagagtcctcctaccttggcttccctaagtactgggatcgcaggcctgagccaccacagctaacctgatttttataacaagggggaaaataatcagaggacaaggccatgccctcccctacctcccaggaatgcaggacacaagggggcagcctacctcagggcagggccagcggggttcctcatccttaggccagtccccggggctcagatgattccagggaaggccgacccggctgactgccacctccaccatcactctgcagagcggttgagcatgaaagaccagctgatcgcacagagcctcctagagaaacagcagatctacctggagatggccgagatgggcggcctcgaagacctgccccagccccgaggcctattccgtggaggggacccatccgagaccctgcagggggagctaattctcaagtcggccatgagcgagagtaagttggctgcccacacctcaagggtgcagtcttgccggggtgggctcctcagggaaccccaggccaggctcacggctcattgtggccgacacggcaccctgtccaggacaggcttctatgtggggggggcccaggagcagcactgaccgccccccggtgcctgtgagagccagaagggccttagacataatctgggccaagccgctccttgcagacataaagcactttctccccgttcaacaaccgctctgatgctccctgcatgcagaggctctaagccgggccgtggggaggatctgaagttgactaagactggttccctacctaccagaggttcctcttcttcctgggaggtgggtcctggtgatatccccagaaaaacacacgcacactccctcagtgggtccccacgcacagctctaacacagccgccaggcccctgggctggccgcttgagcaggcagtcagcgcccagtctgctctttctttttttcttttcttttttttttttttttttgagatggagtctcgctttgtcacccaggctggagtgcagtggcgtgatctcggctcactgcaacctccacctcctgggtttaagtaattctgcctcagcctcctgggtagctgggattacaggcacccaccaccacgcccagctaatttttgtatttttcgtagagatggggtttcaccatgttggccaggctggtctcgaactcctgacctcagatgatccaccctcctctgcctcccaaggtgctgggattataggcgtgagccaccgcgccctgcctcaatctgctctttcaacagtgagggaagccgactcagcccctgccttccagagcctttccgcagaataagacggcagagacgggggtcagtctttctccctccaggcccactgacatccttccacccggctccagtggccattgttcttggccccctggggacactctcatatcccgcaccttggcctggaatgttcttgtccccacctctgtgcctggccacagcctgttggtcctagagggctttctgtagacagcccttccccacaaagtcactctcccatatggccattgtcacacaatcagtgtatggtcattgtcatataacacaccaagtgtttcctgctggccctgggcagggccacatccagcattcgccagcccctggcccagggcggcctggtggaaggagctgcaggagcctgtacccgccctccccatggctgccccacagccctgtcctctcacttagacgcagattggcctgtcctggtggccatacctgaagtaagggtgtgcgcagggacagtggggctgaaatcccacggcacacagaagggggcaggcgatcaccaccccagtgagtccctccgtccacccgggtctcgctgccccagcgctccgtattcccccagcacacttccgcagggcgacccgtgcctcctgtccccttccttccacagtcgagggcatccagagcctgatctgcaggcagctgggcagcgccaacggccaggcggaagacggaggcagctccacaggcccgcccaggagggctgagaccttcgcgggctacgactgcacaaacagccccaccaagagtaagagcggggccgtctcccctcctgcctccagggccgcccctcaggatgcacattaacttgtatggggtttcctagaactttcttttttgttgttgttgagacagagtcttgctctgtcacccaggctggagtgcagtggcgcaatctcagctctctgcaacctctgcctcctgggttcaagtgattctcccgcctcagcctaccaagtagctgggactataagcacacgccaccatgcccggctactttttgtatttttagtagaaatggggtttcaccatgttggccaggctggtctcgaactcctgacttcaggtgatccgcccgcctcagcctcccaaagtgctgagattgcaggtgtgagccaccgcacccagccgattttctggaaccttctgaaaccctccagacatcgttggttgtgttgtgacagcagcacccagaccagcctgcccctctccagcaggcgtctgtgctgcagacgccaccattcgggcctagcctgggtttcctacctgggcaggggctgggggtggactgggaagcttccccctccccacgggatggcagcatcctcatgcccctggcttggggttctcagatggcagtttcaagaagaaagtcagcagcactgaccccaggccccgagactggcgaggccccccaaacagcccggacttgaagctcagtgacagtgacattcctgggagctctgaggaatcgccgcaggtggtacgtggatatccatttgctcggtacagtctgagtcgtcataaggattcatgtgtgtgagcagcttctgctggggttgtccagttttagtcttattagcatcgacaagcattgtttgttttgtggtgaataacagtatctcagcccagattaatgcactggcaggtgatttcttcctgcagcctcctgggaaaagcaaagaggtccccaagaggaaggctggggaggggacaggctcagggcactcaccatggcttcatcaacaggcgaggaaccccctacagggaccaccagctttcagccggggcaggtgtggtggtgcctaccagatgccagatgtccccggctattcctttgcctttgaatcagaaggccaggtgcctactcggccctgcccaggtcagggggtcagaggccaaggccagttgcctctgatcagttctgaggcttggacttgcccctgtggccagagctggcacgcaggcctcatagccaagcccactctacctcccaggaggccccagcccctcgttttccaaacacccagatttgtacaagtcagctgaccagcagggcctgtgttcccagtcatgacccggtcctgggtccttcctgttatccacactaagggatgtattttcaataataagcaggggccgggtgcagtgcctcacacccataatcccagtgttttgggagaccgaggtgggaggatcactttttttttttttttttggagacaaggtctcactctgtcacccaggcttgagggcagtggcgtgatcacagctcacacagcctctaactcctaggctcaagcaatcctcccacctcagcctcccaagtagctgaaactacaggtgcgcgcccccacacctgactaattttttaaatgtttggtagatacagggtctcactatgttgcccaggctggtttccaactcctgggctcaagcaatcctcctgcctgggcctcccaaagtgttgggattataggcaaggccgccatacctggccttgggaggatcacttgaggccatgagtttgagaccagcctgggcaacatagcaagaccacatgtcgacaaaatatttttaaaatagctgatcctttggctgggtgcggtggctcatgcctgtaatcccagcacttcaggaggccgactcgggtgatcacttgagtccagggtttgagaccagcctggccaacatggtgaaaccctgtctctactaaaaatataaaaattagctggacgtggtggtggatacctgtaatcccagctactcaggaggctaaggtgggagaatcgcttgaacctaggaggtggaggttgcagtgagccgagattgcaccactgcactctagcctgggcgaccaagcaagactttgtttcaaaaaagttaaaaatagctgctgggtgtggtggctcacgcctgtaatcccagcactttgggaagccaaggcaggtggatcacctgaggtcaggaattcgagaccagcctgaccaacatggtgaaaccccgcctctaccaaatatacaaaattagccaggcgtggtggcacattcgagtaatcccagctatttgggaggctgaggcaggagaatcacttgaaccaggaaggtggtggtttcagtgagctgagatcgtgccattgcactccagcctgggcaacgagcaaaactccatctcaaaaaaaaaaaaaaaaaaaattaaaaatagctgatcctggtggtgcacacctgtagtcccagctactcaggaggccgaggtgggaggatcaggccactacactctagagcaaggccctgtctcaaaaaaaaaaaaaagaagccaggcatggtggctcatgcctgtaatcccagcactttgggaggccgaggcgggcggatcacctgaggtcaggagtttgcaaccagcctggccaacatggtgaaactccgtttctactaaaaatacacaaaattagccaggcgtggaggcttgagcctataatcccaattactcgggaggttgaggcaggagaattgcttgaacccgggagctggagggtgcagtgagccaagatcgcgccactgcactccagcttgggcaacaagagcagaattccgtctcaaaaaaaaaaaaaaaaaaaaaagttaaaaaaaaagaagaagaagaagaaggcttgagtctagtcggatgggtcttgagccactctctctggtttgacggtgtcctcttcccaggtggaggcgccaggcacggaatccgatccccgtctgcccaccgtcctggagtcggaggtaggcgcccgcgggtctccatctccccagggccttgtgcacgcgcgtgtggcctcagcccgataactagcatcaatctccctctcctctccgcagcttgtccagcggatccagacactgtcccagctgctcctgaaccttcaggtacaggggcggggtggggccggccacgcgtgccctttcctggttggctggggcgcaggtgcggctctcactcgcctggccctggccctccgcaggcggtaatcgcccaccaggacagctatgtggagacgcagcgggctgccatccaggagcgggagaagcagttccggctgcagtcgacgcgtgggaacctgctgctggagcaggagcggcaacgcaacttcgagaagcagcgggaggagcgcgcggccctggagaagctgcagagccagctgcggcacgagcagcagcgctgggagcgcgagcgccagtggcagcaccaggagctggagcgtgcgggcgcgcggctgcaggagcgcgagggcgaggcgcggcagctacgcgagcggctggagcaggagcgggccgagctggagcgccagcgccaggcctaccagcacgacctggagcggctgcgcgaggcccagcgtgccgtggagcgcgagcgggagcgcctggagctgctgcgccgcctcaagaagcagaacaccgcgccaggcgcgctgccgcccgacacactggccgaggtgagcgcgcagcagccagtgtgcgcaggttgggggtgaccggtttgcacgtgcatttgcacgagtgcatgcaggtgacagggttcgcgggtgcatgcgtgcaggagtgtaagagcaaacggcacaagatacccttgcattaacagctcatgccgcagtacagacctttctcggagctggctaaatgcttaacagaacgctgttgctcaaaacatgccataaatgttagaaacttcttaaaaaaaaaatgcactcctgtaatcccagcactttgggtggtggaggcaggcggattgcttgagggcaggagttccaggccagcctgggtaacatggcgaaactccatctctacaaaaaaatacaaaaatgagctaggcatggtggcatgcacctgtggtccccgctacttggaatgctgaggtgggaggatcacttgagcccgggagaatgaggctgccatgagccgtgatcacgccactgcactccagcctgggcaacagagtgagacatgagccgtgatcatgccactgcactccagcctgggcaacagagtgagaccccgtctcaaaaaaaaaaaaaaaatgaagctgggtgccatggtgtgcaccctagctactcgggaggctgaggccggaggattgcttgaggctaggtatttgagaccagcctgggccacgtagtgagacctcatctctaaaaaaaaaatgcaaaaattagcagggcgtggtggcacatacctgtaatccaaactacttgggaggctgaggcagggggatcatttgagcccaagaggctcaagagctatgattgtgccactgcattctagcctgggtgacagagcaagaccgtgtctctgaaaacaaatctataaaccatgggttctgtgaacagatgtggacacggatgtgtgagatgtttgtatatgagtgtgtgacagtatgggtgccactgagtgtcaccacaagtctgcacatttagcaggggttggggacgggcaatgaccagcagctccttcaggctgcacctggctctgtccagaacaggagaggtcgagggtctcctgtgcacgaccctcgggggctctccagaggccgcacagcaggaacctcacattggatgtatctgctgttgtcccctcaggcccagcccccaagccaccctcccagcttcaacggggaagggctggagggccctcgtgtgagcatgctgccatccggcgtggggccagagtacgcagagcgccccgaggtggctcgccgggacagcgcccccaccgagaaccggctggccaagagcgatgtgcccatccagctgctcagcgccaccaaccagttccagaggcaggcggccgtgcagcagcagatccccaccaagctggcggcctccaccaagggtggcaaggacaagggcggcaagagcaggggctctcagcgctgggagagctcaggtgagccggccccaccccttcgcctgggcctggaaggtgcaactggtcaggctctagcggctcgctgggagccaggaaattcgggacacctgtgccatcctctggagaggaaaaccagaaggcacagctggcatcgtggctgaggccaccccacacagggccgtgtttggtctccaggcccaaaactgagatgatccaccctgcatcttctccacctcaaccctcaaaacagtgggatggggaccaggagccttagaaagggacacgggcaagaaggcagagatccctggccacgtgggatcagcacagccgggacagggacaggtgcaggcgcctctgctcattgtcccagttccacagagccgttccacagagtgggacacggagcccagagcagccccagtgtttccacggaggatgtccaggagctcctctgggggacacctccctgggggacaaccagggatgttctgggatgttctctgaagattaagggtgtgtcccgtggtcactagggcctgtgctatttccacaggaggctcagcctcctctccagatgccgggtgactctgcaggtccttccgcagggaggttggggccgttctccctgaatctggggcttagcatctgagcagctcaggtcacgggatccaggccgcccgtgggaagtgtcaggtgggggtggccaggcccctctgctctcggaggctgccctggcgggtggggacagctggccagcctggagctggcccaaataccttctctcttccagcgtccttcgacctgaagcagcagctgctgctcaacaagctcatggggaaagatgagagcacctcacggaaccgccgctcgctgagccctatcctgcccggcagacacagtcctgcgcccccaccaggtgagcccccaccccctgacatgagcccagtcccagggcagcggggctgcggcaccacccggcgactgctcagtctgaaccctctctctgttccagaccctggcttccccgccccgagcccaccgccagctgacagcccctccgagggcttctctctcaaggccgggggcacagccctcctgcccgggcccccagctccctcgccactgccggccacaccactcagcgccaaggaggacgccagcaaagaagacgtcatcttcttctaaaagggccgtgactcaaggtgcaaggcccctccctgccctgcccacccttcctgctctctggggacccccatggggtcaccatgcccacccagctgtcccctcctcttccctagcaaaccactgatgaccgcctggcaggggccagcctgtcggtgctctgggccttgcagctgtttctgtagggttagcggtggtgccggggtcactttctgaatctctttttttttttttcaaaaaggaaagtttttaatggaaagttgagccagaactaaaccagggagctgtctgaaatcatagcaccccatccgggtggcggggagatcaactccgagctgtttttccgaggcagtgaggaacggtgccggctctgcacggagctgaggacaggacagaccttgctttgagaaggagctgccggccggggccacgctccacagccgccgcgcgacagtggagccaagggttagggcaccaggaggggccaggtggcgtcggcagcatctgtccccagaatcaggcagaatccacttcccaaacagagccccacgcaggttcaccatgaacctcagggtcagggaatgagccaggcacgggggcatgggcagagagggccacggggcagggcccactgagggaacatcagtggccctccagtcaggttctgtgggtttggaagcccatcgtgaaaggggctgacctttgcccctttttacttggcattggttttgaaaccagctgtttcccaaactctgcttcccaagggcaaccgttgctgttcacacgctcagcctgtctgggggagcgggcctctagcttcagccagggcgggtacacaccctgggcacagggtcctcagcccccgggaaatgagctcccagggctggcgtcccaccttccaggtgggggctggcacatcacagactgtcgagagcgccatgtcccagggcatgcagaggatgcacctagagacgttgcagcaagtggacaagtggccgctgtgcgggcccctcgcttgtagtgagctgttgcagcttacggtccgttccctggaggggtggaggaaggaggtgttgggcagcatcaaaggtgctgggacatcccagggtggtgagatccatccacgatccagctccggtggagaaagggcccatgtcaagccttgttctgcaccccaagcattggtggtaggactgggtcctggctgatcgtccttgttcccagtggggtacatgtgagcccctgccagggccaagtccttctcccgaacccagggtcctgggaactgcagatcccggggggattcagcccttctcccactgtgctggcagaggcactcctgtgacgctgaatacagtgaacagggacattcccgccactcggggacagatgggcacaagggaggggaaactccatcaggaagtgctcccctgggcagaggcgcccactgggtgctgtgggctcaggagggggcggggcaggagctggtgccaaccgggaaccagagccccacagccatacagcccattggtgacaaggtcctgagaacacagtggccaggtgtccccaggctcctggcccctccgacgacctcaactctgcccagcccggtccctggccatcagcgacgctgtccgccccccgtcagatcccatgtgtgccatgtttatcatcagtgttttgtatttttgtactgagtatcggagcactttacagaagctgactgtacattcctgttctgttgtgaagagaacattcccagaccctggcaccctcctgagccggcgtgtgccggtccagccctccgagatgccacaattccttggatgggggagaagttcaaggaatttctgctcggccacgcggtgggaaccccgcgtccccgccatgtggcagaggggtctcagtcgtgctaggcatcgggcggcagcgccgacagcccttccctcgccagtgcccctcggccactcctgggttggagcccgattttatttgtaaagttgacagtcgagcaaatgttcctattttcgtgggatctgcacacgtctttgtcagttgtggtcatgatcttagtcacctgctaattatttttacaatgattacaacatttcctcactgcgggatatttctgacccgctttagaacttaagacctgattctagcaataaacgtgtccgagatgagcggtgactggcgtgcacgttcttggaggttttatttgaggattttcttctgcccaaacgttgctgcaggagtagcaggttctgttgggggctccccatggctcctgcccctcagctcgctcacctgccctccgtgtcctgcttaacgctctgaagaccccttcaggtccagtccccaggagttgttgggggttttgtttttgtttttgtttctgtttttttggtttgtttgtttttttgagacagagtcttgctctgtcgcccaggctggagaccagtggcaggttctcagctcactgcaacctctgcctcccgggttcaagcacttctcctgcctcagcctcctgagtagctgggattacaggtgtgcaccaccacgcccagctaatttttgtatttttttagtagacatggggtttcgccatgttggcgaggctggtctcgaactcctgacctcaagtgatctgcccgcctcagcctcccaaagtgctgggattacgggcacagggcaggagtggggcgtggaggtgcctgtggagggtcctgcccaccgggtacacttcaggctttggtggcgcctccacgaaaatctttttgcttttaatccacaataaccgcaaaggctggaactttcacttcctccatctggggtgagaggcagcttggccatgagtatgaaatcatcatttccacctggtctgagtcccggtccagtgaggcgaggaccctgctgtttcaacagagggtttcccatcacaaggggactaggtgtaaagtcgatcactagctcactaggaagcgcaaaaagggaactctcaggcagcactgtccaccaggaagatgatgcaggccacgtgtggaatttttcatttttagtagccatattaaaaaagtaaaaggagggccgggcacagtggctcatccctgtaatcccagcattttggggaggcgggggctgaggcaggaggatagcttgagcccaggagttcaagaccagcctgggcaacatagtgaaaccccttcacagaaaaattaaaaaattagccaggttggccgggcgcagtggctcacgcgtgtaatcccagcactttgggaagccaaggtgggcagattacgaggtcaggagatcgagaccatcctggctaacaaggtgaaaccccgtctcaactaaaaatacagaaattagccgggcgtggtggcgggcgcctgtagtcccagctactcgggaggctgaagcaggagaatggcgtgaacccaggaggcggagcttgcggtgagccgagattgcgccactgcactcagcctaggcaatagagcgagactccgtctcaaaaaaaaaaaaaaaaaaaaaaaaattagccaggtatggtggcgtgcacctgtaatcccagctacacaggaggccaaggcaggaggattgcttgagcctaggggttcaaagttgcagtgagctatgatcgtgccactgcactccagcctaggcaacatggtgagaccctgtctataagagcttaaaaaaaaaaaaggaaatttgggggatagaaaaaagaaatgaaatttaaaaaaaaaagaaaaaagggctggacgcagtggctcacgcctgtaatcccagcactttgggaggccgaggcaggcagatcacctgaggtccggagtttgagaccagcctggccaacatgttgaaaccccatctctactaaaaacacaaaaatcagccgggcgtggtggcaaacacctgtaattccagctactctgggggctgaggcaagagaagcggttgaacccggaggcggaggttgcagtgagccgagactgcacgattgcactccagcctgggggacaacagtgagacttcgtctcaaaaaaaaaagaaaaaaaggatgtaattaatttattacatttttatttatttttttgacatggagtcttgctctgtcacccaggctggagtgcagtggcacgctatcttgactcactgcaaccgccgcctcccaggttcaagtaattatcctgcctcagcctcccgagtagctgggattacaggcacccaccatcatgcccggctaatttttgcatttttgtagagatggggtttcaccatgttgaccaggctggtcttgaactcctaatctcaggtgatctgcctgtctcggcctcccaaagtgctgggattacaggcgtgagccaccgcgcctggtctattttttcttcattgtggtcaaatgcacacaacataaaactggccagttgctattctcctgatggtgggcattggagtgtgtgtgtgtgtgtgtgtgtgtgtgtgtctccccccaccctctgatttgctccaccccaaccccagccgtcctctgacctctgcctagctgacccctccactgggatgcccccagccttcctcagcactccttatgggccctggggggcttggaggcaccctaaaatgagatgttctgcaaagagggcctgtagtggctgggcacggtggcccacgcctataatcccagcactttgggaggccgaagtgggtgaatcacttgagcacaggagttcaagaccagcctgggcaacgtggtgaaaccccgtttctactaaaaatacaaaattagccaggcatgcttgggcgtgcctgtagtcccagctactcgggaggctgaggcagagaattgcttgaacccaggaggcggaggttgcagtgagccgagatcgcgccaccgcactccagcctaggcgacagagtgactctgtctcaaaaaagagggcccgtagtctttaaggttcacaaaggggtctgttcccagcccctaaaaggttgaaaaccactggaccagaatgggcaacccagggacagagtagtggtcaccaagcctgggggctgcgggtgggtaacagctgaggggtgtgaggtttctctctggggtgatggaatgttctaaggttgactgtggctctgcttgcacgactgtgaatgtactaaaagccactgaactgtcccccttctgtggataaattttatatgtgaattatatttccataaaactgtttaaacacacacacacacacacaaccacacacacacacaaccactggaccagctgagagagtgggagagcggcctccctttctggaagcatccaacctgtctgctctgtgcctgggctccacatggtcagtgtccaaggccttcccagcccaggctgtatccctgaaggtggcttgcttttcctcctggcacctgtgaccaggtggtcatgtggcttccccacacagaggcgctgctccaagggccccactggtatgagctagtaagtagttgggtctccaggtagacaatgagatgccctaatcatgcaggtgctgctaggggctgggaaggaggcctctgctgagggccaggacaggcctgcacccccgacaagggaaagaagggggaaacccaccaagcctggcccactcgtgagtcctgggcagaaggagcccccacagatggggtctcccgcacccgtgtgaccctgagcagtccccggcctcccagctgctcagagccacctggtatcttccttgtaaaaaacaaaccacaaatgtactctgggaggccgaggcaggcagctcacttgaagccaggagttcaagaccagcctgggcaatgtggtgagaccctgtctctacaaaaagtttaaaaattagctggatttggtgataaacacctgtagttcctgctattcaggaggctgaggtaggaggatcccttgagcccaggagtttgaggctgcagtgaggctatgatcgcaccactgcactccagcctgggtgacagagatcctgggtcaaaaagataaaaatcaaggcagtgcaattgatatcacatgaggcccaagggcgcacacacactggctgttgtgtgttcctgggccaggctgtgcaacaatgtctgccagaggccacatgtgcacagactctgaagggttgttctcagccagcagactaagcagtgccctcatcccatcccaccacacattggctgaggtgggagccccaagtatcttcagcgatgccagtgtgtgttgcccagtctcagcctggagcccttaaaatgctcacagtggccctgcgtcggcagcacagtggcatgaggccacgccctcgggtggcctgatgagaggtggcgcctctggcctgtgtgcccaggactctggggagtagagaacagccctcaatggctggaggccacttggggtccgtgggcaacgcttgctcaaagatggagaggacccaccgggctgagggcattcctgaaggtgggctggggtagtgtggtttccaactttgggtccgtcctgtggagggtaaggggccaggagccagcagtgtaataaccttcacccctgagccaggcgccagcaccacaatgtttaattgattcccgttccagctttctcaaggcacgacaggccccctcttcctcatcttgatttggatacaagacgccagctggcaggcaggaggtgctgctgaagccctgcacggcccctgaaaactgtcacggctcaggagctccaggctgaggcctgggggacctcgcatcagtccctccacccaccctgcccatgggtttcaccacaggcagctccatgagagccccggcccctgccctggcggcttctgctttgcgggaagggccctccgtgggctctggctgtgtccctgtgctcttccggcagtgtcagggggtagtggcctcggcctggccgccggcccgggccgcctggtacatgctgaggattgaggagatggtgcccatgaggcccactagccacggcgggaagcggccggcccacagcacgccccggggcagccagtgcacggcgttggccaggtcggccaggttgctgagaagtgacagcgcctccgactgcatctgcgcctccatggccctccgcttgccccggggcagcgggctgtggggcagagaggggccgcttacactcacgctcacacctgcctgcccttcccaagcccctgaatgccctgtgtggcctggcagccctgagcccctgcctgtgagtgggaggagctggcaggactgaggtggcctccctgaccatccacagagactgagtccccatcacccccccgacccaagcacgaacagggcaggaacccgggtccaagtcctcaaatccacacctcactcctcgtcctgaacacccagagatggggattccttgtgaaaaacagaaagcacaaatgcactttgggaggtgtggagggaagggggaacccccaggagcgtggcctgtgcctgcccggcctttctttatcaggatgacacagtgacgataagcctggccaatatggcgagaccccatctccaccaaaaaataaaaaacaaaattagccaggcgtgctggcccgtgcctgtagtcccagctactcgggaagctgaaacaggaggatcagttgagcccaggaggcagaggctgcagtgagccaagatggcaccactgtgctccagcctgggcaacagagcaagaccctgtctcaaaaaacaaaaagaaaaagcaacagtaacaatggccatggccttcgggaaattgatcattctctcctgctgggggcgcagccatgaaggctcagccctggagtccccgctcaagcaagcctcagtttctccatctgtaaaaggtaccgccacccaccagaggctgtgatgactcccccatgacctgagcacaacagtccccagcatgggcctgcacaggggtggctgcgagccgggatcccacgcctgctggagggagtgggcctccctgctgggtgatcacgggctcctacctggtgaagggcgccgtggggctccgcagcctctgtctcagtttcagcagcatccacagggacctgcagcaccagagcccgagggaggatgccccggcggggagcaggagggttagctccacaacgctggccccggacatacagtctgggacaggtgctgcatctcggataaacggcctgccctctccctgcccccacagtcccacaccctcctggctgtgcctcatgctcccggggactcatctctaacacggccccgtcccacccgggacatcgtcctgcacttctgacgtggccatccagggcctggcccagcctctgcaaaccactggcaagtgctcaaaggaacatcaagccccgtgaggtgttcacagcctggcagggagtcctacacagaaaaggatgccaagaggcccgcagttggacaggcgtggggacgccgtttcccctccgggcctcagctgccttgtctgctctgtgtggaaaggtccaaatcagtgccatgccagcaccccctgcacacacaccccggacattggctggacctgtctggatgatcccctgggcccccagggctggcatctgcaggctgaggaaggggctacccagtgggcagcctctgtgctcccagcaggctctgcagccgtgcatggcacccacccgggccagtccaccaggcacctgcactctccagcctcggccgtggggtgtgccgggttgtgactgtgacagaatgggcagggcctggtcacaactcctctggccactgggtacccagggtgcaggatgcaggatagcgccagtggcacagcaggtgggagcctcctggggggctagggaaaaacactgattcctgggctccccagacccacagaatcagaagctctgggccaagcgcgatggctcacacctgtaatcccgggactttgggaggccaaggccggtggatcacctgaggtcaggagttcaagactagcctggccaacatggtgaacccctgtctctactaaaaatacaaaaattagctgggggtggtggtgggcgcctgtaatcccaggtactcgggaggctgaggcaggagaatcacttgaccccgggaggtggaggttgcagtaagccaagatcgcaccactgcactccagcctgggcgacagaggaagactgtgtctcaagaaaagaatcagaagccctgggcgccggacccaggcatctccatttagcaacctcctggctgatgctccggcagccctgggccttagggcagatgtctggtcatgatgagcacacatggaatgctctccacccactccccctgctcactgcaaatccagagaaatgatgaaaaaccacatgcccgaaacaagaatgccgcagcaggcggggcacacaggacttcgatggccgtgaaacaattccatttgattctgcaaggggggacacgtgtcagtgtccaaacccataggatgcccaaaacctagcgtgaaccctaacgtgagctactcacttggggtgatgatggatccatggaggggcatcagttgtaacaaatgcaccatgtggatgctgccagtagtcggggaggctgtgtgtgggggtatatgggagctctctgaacgttatgctcaattttgccatgagcctaaaactgctctaaaaaaataaagtctgggccgggagtggtggctcacgcctataattccagcacttagggaggccaaggcaagtggatcacctgagcccaggagttggagaccagtctgggcaacatggcaaaaccgtgtctctacagaaaaaaaattacaaaaattagccagatatggtggcacagcctgtggtcccagccactcagaaggctgaggtgggagtattgtttgagcccaaggggcggaggttgcagtgggtcaagattgagccactgcttttcagcctgtctcaaaaaaaaaaaaaaagtttatttaagcaaaaaagaaaggaaccaaggctgcccctaaaatacaaaccagaggtcacgaggcacccagaggaaggtggcggaagagaggctgtgagccaaggcccccctctgaccggagccccaggaacatccaggctgggcccaggcaccctcccccaggtctcccagcacacagggaaggccagcagcacagacaccgctgcctccaggggccatggccatgaaacatgacccttttgagacagccaaaatgcacaggcagggtattaggtcaaaggctggaaaagaaccacccaagcttgaacagtgggagtctgggttggattgtgggtaattcgaatcttctactctgaggtttatctattttccagattgtctacggtaagcatgtaattaggacatctgtgccggggggaaaacaagaactactgagagtcagagcctcgaccagggacaagcaaagcttcccccagaaaaaggacacagcctgcctgaggctgggggcagccgcacctcaccccagcgatctaagagcccttcacagccactgaaacatggagaccagggggcccagctcctgctggtgttttcaggggcaggggattctgactcagcgcatttgcaaagaggaaaatgtttgggaggaaaccattactagaaagttctagaaactatatggttttttggaggcacagaactagtcaggaaactgctgactgttttctctggggtgtcggctgacagcaacgccagcaagactcagggacccgggtaaaggccactccgctggctgcttctcacaggccctggagttacttcttctttctaagtgtggtcagcagagtcatgaccccttctaaaatgtccatgtcctgaacctgtcaacatgttcacctccaaggcaaaggatattttgccgatgggattaagctaaggattttttctttttttgacacggaatcttgctctgtcgccaggctggagtgcaggggtgtgatctcggctcactgcaacctccacctccccaaattcaagcaatcctcctgcctcagcctcccaagtagctgggattacaagtgtgcaccaccaagcccagctaattttttgtatttttagtagagacagggtttcaccatgttggccaggctggtctagaactcctgggctcaagtgatccacccgccttggcctcccaaagtgctgggattacaggcatgagccaccacgcccaacctaagctaaggatcttgagatggggtattaccctggatcatccaggtggtccccatgtcatcataggggtccttataggagggaggaaggaggatgagggtcagggaaggaggtgtgacgctgaaagcagaggtcatgcttggaagatgaaggaaggggccatgagccaaggaatgtgggtggcctccagaagctggaaaatccaaggaaacggacctccccctgggacctccagaaggcatcagcgcctgctgacactagcccagggagtgttctgacttccagccttcagaatcctaagataagaagtttctgttgcccagcactacagagttgtgctaatttgttccgacagttattctaaacaaatacacccacaaaaggaagaaacaacaaaacctccaaggaaaactctaagaggcaaagacccaccgcagtctgaagcctgtgctgttgctggggccgctgccactttgctaaggaggcaccgcccagggaccttgggtgctcccttctggcccatgccacttacctggcaacccccaggagcagagagagggcccacagggttgtactcagcgtccaccaccgagaagagtccacgtggaggacccgggcatcagccgcccaggccacgtgctcacaggggtagtagagctggtcagccaggttccctaggacggagacacagcggacaaaggcgtcctcctcctgcaggaccaggagcagagggggcctagggtcagacttacccactgcccattttagcaccgtagccatgccaggtggcagagagctatttcctgaccccagtccctgggccgtgtccaggcctggcaggccccgcgggagaaaggctctggggctggggtccccgcacaggcctgatttctgtgtctcggcagcacggtgctcagtgccccttggagggaggctctcaacgcagctgtgcagtgcagtcctctgcagagcttcaaaaaccccatgcccaatgccagccgtgaggattctgcctcactcagcctggggcaggccccagtaccgggaattttcacagggaattttcacattcccaggggattcccaggccaagttgggagccctgtgtcagagccttccttcccaaaggcttccagttcctgcacaggtggggacctctgttgccagactctatgcagggagcatgaggtggcccgcagcgaaccctgaccaggctgagatggtgtgccaacccttgggccaccgcacgcccactgctgaccacgcgccaggcacagtgcggcaaggctcatggcctccctcaactccgagcaagttacagacggccacgctgaggctctcagggaaagccgctggcccccagttccggcagggatgggcctccaggccctcgaattgcaatgcacacgcgggctctcggtcctgcacagtgcccataccctctgccccaagttcttaatcacacggcctagagccagcgaggcaggaccagttgaggctgtagaaaccagcgctgaagcctggtttctgggactggagccccgcagccaaccgggggacccgcccccttgggaccccaccccccttgggaccccgcccaccgtgaccccgccccatcggagccccgccccctctacctttatcctccttgttacctgccacacccttcccctcctctctgacttcccaggaagctcctccccgcccccaccgctgattccagatgctgctctccttctttctggccagtcatgatcctacctccctccgggctctgaacctcactccagcttccctcatctgcctggcgcgtcctggcacattgcccacctccctgaggatggcggaccccgccccaatgtgctcattccgcccggatttcctgagaagcggcagggtccaggctagactctggggaggggcagaggctcaccagggcagggaggaacgcagacatataaaccgggaacccaacaaacagggctcttgttctggccaagggacactcgaggtgcaagggcctccaccccttgcctgagggctcttccacagagggcatagaggaacgaggggtctcagggatgcaccagagcgctgtcctaatcagacacggaggaggaggatgctataggtgtcaaaacaggaaggcggcccacagcaacacttatgatataggatgatcaggccaaggacacgtggtgctgaacacggtggggttgggatttcggggcggggagcacctgagtagcaagtggctcagagaggtgatccctgggaggacagagagaacagacagggcagcccagggaggggcaggacgctgagaggctggcccacgcagcctctgagatcatcccgtggggggcaagatggctctctagataggctggcacgcctgtgggacgccgcagggacaaggctactctctgcagcactgtcgcaatagcaaaaccttagaaatcattgccctgtgcgtcaaccagaggccaattaaataaatccgaagctgcatagcagagcactatgtggtcctgagaacgcagctctttctagaccgataagaaatgatctgtggccaggcgcggtggctcacgcctgtcatcctagcactttgggaggcggggcaggtggatcacttgagcccaggagttcaaggccagcctgggtaacatggcaaaaccctgtctctacaaaagatacaaaaaattaaccaggtgtggtggtgcacctgcagtcccagctattccggaggctgaggtaggaggatcacctgagcccgggaagtcaaggctgcagcgagccatgatcacgccactgtactccaggctgagtgacagagtgagaccctgtctccaaaaaaaaagaaagataaagaaatgatgccgaagctgtaccgttaagtgaaaaaagcactgtttatgtaaaccatatgtatttgcctatgcgagtacaggaaatctcacaaaggagacacaagaagctgaccacagggccgggcacggtggcgcacacctgtaatcccagcagtttgggaggctgaggcaggtggatcacttgaggtcaagagttcgagactagcctggccaacatgacaaaaccccgtctctactaaaaatacaaaaattagccaggcatggtggggggtgcctgtaatcccagctacgtgaggggctgaggcagaaaaatcatttgaatcccggaggcagaggttgcagtgagccgagatcacgccactgcactccatcctgagtgacagagtgagaccttgtctcaaaaaaaaaaaaagaagctgaccacagtggctgcctctgtggggaaaaattggaggcctggaagatcaggaaggagggaggttttttaaaattatatcctcctttggaatgtgtgaacgtttgctatttttaaaaatttaaatcaaaatgagaacatctgatcctctcaaagaagaaagtgaaatttttaaaagtaataaactacccacgcagggagcactttgggacaagactataaaacgcccatggtggctcacgcctgccatcccagcactcagggaggctaaggcgggaggaccacctgagcccaggagttcaaggctgcagtgagctatggtcactccactgcactccagcctgtatgacaaagcaagaccctgtctataaaaaaaattttttttgtttgttttatttgagatggagtctcgctccattgcccaggctgccagtgcagtggcacaattctcggctcatggcaacctccacctcccaggttcaagtgattctcctgcctcagcctcccaagtagctggaactacaggcacacgccaccatgccaggctaatttttgtattatcagtagagacagggtttttttttttagacggagtctcgctctgtcgtccaggctggagtgcagtggcgcgatctcggctcactgcaagctccacctcccgggttcaggccattctcctgcctcagcctcctgagtagctgggactgcaggcgcctgcaaccacacctggctaattttttgcatttttagtagagacggggtttcactgtgttagccaggacggtctccatctcctgacctcgtgatccgctcgcctcagcctcccaaagtgctgggattacaggcatgagccactgcacccagccgagacagggttttaccatgttggcctggctggtctcgaactcctgacctcatgatccgccagccttggcctcacaaagtgctgggattacaagcatgagccactgtgaggggccaaaaaattttttaaaaaatgtccactcaggtccgcaccctactccctagagccccacaaaccctgttacctgtgcccccaggccatattgcttagtgtagacaaacatggccaggtcatcaaagagtcgcaagatggtcctgcagtggctgagttgggtggacaccaccaacagacgtgtccccacttcggacctggcgggacactgttcaaccagaactccaccaaccagctggcagcagtaccccagcactcggatctgtgggaaaccagaagcagtcagtgtggccctcctgttctgcagaactgagctgcatccccccatacctggccccgggccccgctggattgagagtgtggaagattctcttttttttttgaaagagtctcactctgtcatccagactggagtgcagtggcacgatctcggctcaccgcagcctccatctcccatgttcaagcaattcttgtgcctcagcctccccagtagctgggattacaggcgcccaccaccacaccctgctaatttttatattttttgtagagacagggtttcaccaggttggctaggctggtctcaaactcataacctcagtgatccacctgccttagcctcccaaagtgctgggattacaggcatgagccaccgtgcctgacccaagagtttggaagattctaaatctacaaagtgacagtaaaagctgaaagtttaggtggggcacagtggctcacacctgtaaccccagcactttgagaaaccgaggtgagaggatgccttcacaccaggagtttgagaccagcctgggcaacatagcaagaccctgtgtctaccaaaaaaatttttttttttgagacggagtcttgctccgtcacctaggctggagtgcggtggcgcgatctcggctcactgcaagctccacctcccgggttcatgcgattctcctgcctcagcctcccgagtagctgggactacaggcacccgccaccaagcccacctaattttttgtatttttagtagagatggggtttcaccattttagccaggatggtcttgatctcctgacctcatgatccacccgcctcggcctcccaaagtgctgggattacaggcgtaagccaccgcgcctggctaccaaaaatttttttaagttaacagggcatggtggttacttgggaggctgatgctggaggatcacttgagcccaggagttccagactgtagtgagctgtaatcgtgctactacactccagcctgggcaacagggcgagaccctgtctaaaaaaagaaaaagaaaaagaaaaaaaaagctggaagtttaaaaacatacttggaggtgggacaaatgaagaaacatgacatcattgatgtaactgaagggcacagcctttgggaacagatgtgacaggaacaaagaaaacaaagctccttacttcccacctcctaggtccttcttttcccaggtggcaggaagccacagctaaagtgtatatttacatctacctgcctggaccaaagcctttggatgtgctgaatggtgggcacaggtgatcaggcctcaacccagtgaacaacaggataatttggtagaattactttagagagaaagaacctactcagtaggtgatgtggagccttctgaaataggtcatcttcactactcagatcttttttcttttggagacagagtcttgctctgctccccaggctcgagtgcaaaggtgtgagctcactgcaacctctgcatcccaggttcaagcaattctcccgcctcagccttccaagtagctgggactacaggcacgcaccaccacatccggctaatttttgtattttagtagagacgaggtttcatcacttttcccaggctggtctcaaactcctgagctcagacaatccacccagctcagcctcccaaagtgctaggatcacaggcgcgagccaccacgcctggcctcccttatatctttattttacctgcttttcagaaattgcttgttcctgttgttttatttatttttacttgtaattcctttccagccccattataatggcaaaacactgcaatctgaatgttcaactcgggggagatttgttaacccacccccccaatcataagatatttgaatggaatctaaatgcctagccaccagtacaccgcctggtacaacctgaatgtctacctataagagactggtggggacaagctaagagtccagactcaggggcatggatggcataacctaaatgttcaaccatatgggacttgattggaactaaaaactgtccagccatagggagagtcttgcaatatcctaaatccccacatgagattgtttgggacaacccagggaccaactacagtggcccggtcagatcctaaatgtccaaacatgggaatctgtttggtatgtaaacgtccagccaggctgggttggcagagacgatctaaatgaccaactggggttttgttggaacccatcgctgcttaggcatggcagggcccaggccatggcgtgttctttggtctaggttggctgaaacaacctaaatgcccaactatagggaatctggttggaagtgaatgtccagccacaggggagccctgcaacatcccaaatcccaacacgagattgttcaggacaacttcagtggcctggtcggatccaaaacgtccaaacacgggaatctggccagtgtgtcaatgtccagacaggttgggttggcagaaactatctaaatgtccaacgctggccagacgcggtggctcacgcctgtaatcccagcactttgggaggccgaggcaggtggatcgcttgaggccaggagatcgagaccatcctggctaacacgatgaaactccgtctctactaaaaatacaaaaaaatagcagggagtggtggcgggcgcctgtagtcccagctactcgggagtgctgaggcaggagaatcgcttgaacccgggaagcggaggctgcagtgagcagagatcgcaccactgcactccagccaaaataaataaatacataaatgtccaatgctagggcaccgcatttgagcctagctcggacggggcctctgcgacggagtatcctgggcgaccccgtcccctctctggcccgtttcccagtctctgagcttgggccaaactctaggacctccggccccggtccgcccctgcctcaccaggcggtcccggcccctgtacgactccagcgccgacgccaggccgctcagcgacgccatggcaactccgtgacgtcaccgcgacgtcggcgcgccgcgccagggggcggggccaggccggggtaccgggagcgccccaaaggcttgcgcgcaggcgcggccgcaggcctttgtccccctgaccggctttttgtccgctgtaggggagggacagagtttgcagaggtggggccgacacgtgtgtgctctccaggcctgcagaccctggatcatcctcggagtttgctgcattctgccccacggcggtttggccaactacccacgcacaaaaaaatatatttctaagtttaaccaactacccacacgctccaaaaatattccaagcaaaaccaccaacctgttcgcagtggttcaaggagagattttcctttttagtttttgtgcttcaccttttctgcactgtctgcctgcccgtagtgagcaggaatgactgctgtaatatcacaacaaggcatctttcgacgttaaggaaagacgttatctttggacgttaagaattgttctagaatacataaataaaaaataaaaatgcacaattcagtgacattagtacatgcacatgttggacaaccatcaccccttgctagtttcggggtatttttatcacccccaagagagacccccgtaggagaccagcatatgcccctctgaaatatgcgaccttggtgtaggattattttgagctgagatcaatgaagctgataccggaaaagctctctgttcttccctgatttgcctcaaagcaggacctaaaggtacaaaggtgccctcctcccctctctaccaggaaggacaaaggttgatcaccagggacacctttagactcttgtctggagacgtcttttttttttttttctttttttttgagacggagtcttgctctgtccccaaagctagagtgcagtagcgccatctctgctcactgcgtcctccgcttccctggttcaagcgattctcgtgcctcagcttcccaagtagctgggatcacagctgtgcaccactgtgcccggctaatttttgtatttttggtagagtcggggtttcaccacgttggccaggctgttctcaaattcctggcctcaagtgatccgcccgcctcggcctcccaaagtgctgggattacaagcgtgagccaccgcacccggcctcaatgtccttttccttcgtcttgtcacttctccaaaaatttgctgctatatgttgaaggtgctatataagcaggagttatataagctatataagccacctcatttctcttggcatctcccatgtacacataaggtacacatgttaataaatttgtttttcccttgttaattttttttttttagacggagcctcgctctgtcgcccaggctggagtgcagtggcacgatctcggctcactgcaagctccgcctcgcgggttcacgccattcttctgcctcagcctcccgagtagctggcactactacaggcgcccgccaccacgcctgggtaattttttttttttttttttttttgtatttttagtagagacggggtttcaccgtgttagccaggatggtcttgatctcctgacctcgtgatccgcccgtctctgcctcccaaagtgctaggattacaggcgtgagccaccgcgcctggcctctattttttttttttttttttttttttttttttgagacagggcctcgctctgggaggaaccaaatttgtagatgtgaagccgccacttgtgtgctctctgggcctgaggacccaggatgatgcccagagcttgctacattctgccccatggtagcttgaccaactacccacaaaaaaggggtagagtgcagcggcacgatcttaactcactgcagccttgaactcctgggatcaagccatcctgccacctcagcatcctgagtaggtgggaccacaggtgcctgccaccacaattggctaatttctttttattttttattttttgtagaaatggagtcttaccatgttacccaggctggccttgagccctgggcttaagcaatcttcccacgtcgaccttccaaagtgctggaattacaggcgtgaaccaccgcacccgcccttcttaattctttcattgcaaggatccatcacagctaagaactaagaataaaggaaaaagtatgtttcctcccctacaccctgttcccataaagcaatcactcaattcctccctcctcccagcccctggcaaccactaatctgcattctctgctgtctctctgtatttttaccacttcttgattttttttttttttttttttttttgagacagagtctcactctgtcacccagactggagtgcagtggcatgatctcagctcacggcagcctccgcctcccaagttcaagcaattctcctgcctcggcctcccaagtggctgagagtacaggtgcgcaccaccacacccggctaatttttgtatttgtagtagagatggattttaccatgttggccaggctggtcttgaactcttgacctcaagggatctgcctgcctcgacctcccaaagtgctgggattacaggcatgagccaccatgcccgacctccttgatatttcatacaaatggaatcatacaatatgtgaccatttgtgtcggcctcttccaccaagcataataggttgttttggtttttgctttttgtttttgagacagggtcttgctgtgtcaccaggctggagtgcggtggtgtgatcatagctcactgcagccttgaactcctgggcctgagagatcctcctgcctcagcctccacattgcctgggactacaggtgcacgccaccacatctggccaatttttaaaatttttcttttgtagagatgcggtctcgctatgttcaccaggctggtttcgacctcctggactcaagggatcctcctgccttggcctcccaaagtgctgggattacaggtgtgagccactgcgtgcagctgagcataatggtgttgaggtttgtctaagttgcagcatgtatcagaaattcattccacttgcagctatataacattgcgccatatggatggaccacattttgtttatccacgtatcagctgatggtcatttgggctgtttctgccttttagcgatcgtgaataagtacagctataaacatttgtgaatatgtagttggagtccctggattccattcctttgggtctatacctagaagtggggttgctgggtcattttgtaactctatgttgaactttttgagtaattgcccaactgtttcccacagtagcagtaccattttccatccccaccagcattacacaaaggttccaatttcgccacttccttgcaacatccttttttgattatgatagccatcgtagtaggtgtgacgtgccaccccattgtggttttgttttgccttttcctgatgactaatgatgtcaacgagtctgtttgttggtttgtttgaatttttttttttgagacagagtgtcactctattgcctaggctggagtgcagtgctgatctcagctcactgcaacctccacctcccaggttcaagcgattctcatgcctcagcctcccaaatagctgggattacagcacacccgccactgtgcccggctaattttagacttttagtagagacggggtttcgccatgttggccaggctggtctccaactcctgatctcaagaaatctgcccacctcggcctcccaaagtgctgggattataggcgtgagtcaccgcgtctggcctcgatgttaaccagttttctttcacagaatatttcctcttgatttcaactcttgttactcttctcctgcattgctttcctcctgttgtttaaagttacagcagattcctgcctcaggaactttgcatgttctgtttcctctgcagaaatgttcttgagccagataccaacgtggctccctccttccctaacttcctttactcgaatgtcatcctctcacgggacccacccgatcacaccctcctggacacttcctacccatgttacctgctggtgacctgtcttgttcatggctatatccgcacagcctggcagaaaacagagaatctgttttgtaagtttcactgccctgtccaaagatctcttcttgtgctccaagggagcatggaacacaagggggcacaagaaaggccttgtccactcctgtgattttcttcctctctgtctctctctctttctgtttttgtttttaaacagagtctcactcggttgcccaggctggagtgcagtggcatgatttcggctcactgccatctccacctcccgggttcaagcaattctcctgcctcagcctcccaaccagctgggattacaggcacctgctaccacgcccccactaatttttggagtttttaatagaaatagggtctcaccatgttggccaggctggtctcaaactcctgggctcaagtgatccacccacttcggcctcccaaactgctgggattacaggcatgggccaccatgcccagcctcttttttttttcttcttgtttgtttttgagacagggtctcgctctgttgcccaggctggagtgcagtggcatgatcatagcaccactgctgcattgaactcctgggttcaagtgatcctccatcctcagcctcccatagcactgggattacaggtgtgtgccaccacacctggccccaagagactctttaacttccacatccagctccttttaagacttgggtccactggctgagctcagtgactcacacctgtaatcccaatactttgggaggccaaggcaggtggatcacttgaggtcaggagttggagaccagcctggccaatatggtgaaaccccgtctcaaaaaaaaaaaaaagacttgggtccacgggtctttgtgcactcccctctcccccagtgggggggtcactctttttttttttttttagagtcagagtctcgctctgtcacccaggctggaatacagtggtatgatcttagctcactgcaacctctgcctctgggttcaagtgattctcctgcctcagcctcccaagtagctaggattacaggcacccaccaccacgcccagctaatttttgtatttttagtagagatggggttttgccctgttggccaggctggtctcgaactcctgaccttggggaatcctcccatctcagcctcctaaagtgctgggattacaggcatgagccactgcgcccagccacggggtcactgttttcacagcagaaaaattgaagccaagccagctgcagtggcctgtgcctgtggtcccagctactcaggagtctgaggcacgagaatcgattgaatccaggaggtggaggttgcagtgaaccgagatcacgccactgcactccagcctgggcgtcagcaagacccatctctaaaaaagtaaaacaaaaaaaaatccaaagccaaggtccagacatgcagaggaaagaggtcactggccgcaaagcctgctgctgcatgaataagcagatccctcctctcaggcccaagagccttggaacagcgcaatgcatttgcccgaatgcttcctgtgtgccgggtcccgctctaggcaacagagatacagcagtgagctttgcagacacagcccagccctcccagcgtcccccatctggctaggtctgagctcgacctttgaaaaagacacaggagctggcctggtgttcacagctggccttggtgttgctaggagctggcctggcagtcaaagcagggccctggtgtcctcctgctggacataaacaatctcacatgacgccgacatcagacaaggccactctgtgaccgcggcagagcaagacaaaacaagcctgctccataatcatgtctgaacacaggcaaaacacgaacactgtccacactatcagagtaactggacctcctctgctactagctaataccagcaacggctgttccttaccaagcacagctttagtcttctgacttctttctttctttctttccttccttccttccctccttcccctccctccctccttccttccttcttccttcctttccctccctccctgcttccttccctccttctctccctccctccttccctccttctttccttcttccttcctttccctcccttcctccctccttccttcccttcgtccttccttccttccttccagctcccagcttccctggagctctaaggaggcaggatttgcacaaaaaacaaaaccgtgcccccaaaacacctaacagaactgcagatcccaaatccctccctccctccctccctcgctccctcccttccttccttccctccctctctccttccttccttctgacttcttcatacagatgattaagatgctgaataatagttacttctctccctagctgctcttttgttttgtgttgtttctgagacagagtctcactctgtcacccaggctggagtgcagtggcggaatcatagctcactgcaccctcactgcaacctcaatgtcctgggttcaagaaatcttcccaccttagcctcccaagtagctgggactataggcacgcgccaccgcacctggctttttaattttttatagagatagggtctcactgtgttgcccaggctggtctcaaacacctgggctcaagcagtcctcccgcttcagcctctcaaagtgatgggattacaggcctgaggcactgcactcagccgcccttgcttctttttttttttttgagacagagttttgctctgtggcccaagctggagtgcagtggcacgatctcagttcactgcaacctccaccacctgggttcaagcgattctcctgcctcagcctcctgagtagctgggattacaggtgcccgccaccatgcccagctagttttttttttctttgagacagagttttgctcttgtctcccaggctggagtgcaatggcgtgatctcagctcactgcaacctccgcctcctgggttcacgcaattctcctgcctcaggctcctgagtagctgggaatacaggtgcccgccaccacacccggctattttttatatttttagtagagacagggtttcaccatgttggccaggctggcctcgaactcctgaccaaaggagatccgcctgcctcagcctcctgagtagcggggattacaggcgtgagccaccacgcccggctaatttttgtattttcagtagagacagggtttcaccgtgttcgccaggctggtctcaaactcctgacctcaagtgatccacccaccttggcctcccaaagtgctgggattacaggcgtgagccaccacaccaagccacaacagcccttttctggacgctactttgggaggctgagattacaaatgtgagccaccatgcctcacctgtgtgttgtttttatttgtttttatctgctcatctcaaaaaagaaagtaaaatttccaaccaataaattcatcccacccaaatcccctacttccttaagctgtgcccccaaaacaccgagcagaattgcaaatcccataataagtgctttctggccgggcgtggtggctcacgcctataatcccagcacttcgggagactgaagcgagcggatcacccgaggtcggcaattcgaaaccagcctgaccaacatggaaaaaccccatctctactaaaaatacaaaattagctgggtgtggtggcacatgcctataatcccagctactcgggagcctgaggcaggagaatcacttgaagccggaggttgcgatgagctgagatcgtgccactgcaccccagcctgggcaacaagagcgaaactccatctcaaataaataaataaataaataaatagcgaaaaaaagttctttctaacacctccctactgagaccgccatagtgccctatgacatgtatgagctctctctccctctctctttctttctctctctctctctgatgaataataagcttgaatgtgttcaatcacaggtacattcctggtggtctttgactggggaaggaggggtgaccggcccctttaaagggagatctgtgagccctagaataatatcaagaggtgcagtgattcagggaagtgggtccattctgtgtggggtgtgtagaaggtagagggacagaaaaactttagaggatgataataataatggacaccagcagcctatttaatcaaatcctcaatactgacactgctttctgaactggctaccatcattagtccccttttgcagatgacaaaacctaagtcctagccaggcatggtggcacacacctgtggacccacccacttgggaggctgaggcgagaggatcgcttgagcccaggacttcaagtccagcctgggcaacatagcgagagcttacctcaaaaacaaaaccaaccgaacaaaaccccagaggctccaaaaagtcaattacttgcctgggttcctggagctctaaggaggcagtattcgcaccaagcctgcctgctaattttcctcccggctgcccctagaggtgctgagtggtcattgtgacagtatcattacacaaaggaagctcttggggtcacaatgcgcagggctggaccacccttggatgcagcctgggaaggaacatgaggatcctctgagagaccagggacagagggagacccaaagatctggtctgtagctaagtgaattttctaaaactcattgattcacacgccatcccttgaggtaggtgcactgtcctcgtccctgatgtacagaggtgaaaactgaggctcatgggagcttaatgacttattccaagattacctggctagtagtctcagttgttggattctctgatgacccattttggaggtcatattcaactctcaactattgcagggggcaaatgattcaaaaagcagcaaactcagccaggcgcggtggctcatgcctgtaatcccagcattttgggaggccgaggagggtggatcacctgaggctaggagttcgagaccaggctggccaacatggcgaaaccccgtctctactaaaaatacaaaaattggccgggcgtggtggcggacacctacagtcccagctactctggaggctgaggtgggagaatcgcttgaatccaggaggaagaggttgcagtgagctgagaaaaaaaaaaaagcaacaaacttacacactgaaaaactgtggtttcattaaaacacacacacacacatacacacacacacacacacacacacacacacccttcatccatgttttctttctatttttgtgatggggtttcgctctgtcacccaggctggagtgcggtagcgtggtctcggatcactgcaacctctgccacccaggttcaagcggttctcccgcctcagccttctgagtagctgggatgacaggtgcatactaccatgcccagctaatttttgtatttttttcttttttttttttttttttttgagacagagtttcgctcttgttgcccaggctggagtgcaatggcgcaatcttggctcaccacgacttctgcctcctgggttcaagctattctcctgcctcagcctctggagtagctgggattacaggcatgcgccaccacgcctgactaattttgtatttttagtagagatggggtttctccatgttggtcaggctggtcttgaactccgacctcaggagatctgcccacctcggcctcccaaagtgctgggattataggcctgagccactgcacccgtctgatccatgttttctaaataggtagaggtaagcaggttttgtgggttgaagtgatctgggaggtcttcctgcaagaggtgagcctgagaacttggaatgctggtctccaagggagacagagaggagagcatgggagacacttgtgatctaagcaaaggcaagaaagtcccaggtgactgagcagaggcggagggtcaggggaggcttggagtctgaagctgaaggtcagaggagagagctaactctcagaaggtgtgaagacaggaagagattgagaataggcaggacctaggacaactgcagagcaggggaaaaccagtaagaaagtgcgtggcaggccgggcacagtggctcacacctgtcatcccagcactttgggaggccaaggcagacagatcacttgaggtcaggagttcgagaccagcctgaccaatgtggtgaaaccccgtctctaccaaaaatacaaaacttagacgggcatggtggcaggtacctgttatcccagctacttgggaggctgaggcaggagagtcagttgaatccaggaggtggaggttgcagtgagctgagatcgtgccactgtactccagcctgggggacagagtgagactctgtcacaaaaagaaaaggaaagaaagaaagagagagaaggtagggaagtgaaaggagcggaggggaggggggaggggcgggggagggggagagaagggagaaaaagtgtggcagaaacggagatggccagtggctggggtgcagggctggagttaggcagaggaacaaaaatgggtcccccagaggggaagaaggagaaaaccgtggccttgacaactgactgagggtgagaagacgcggttcttgtatcagacatacagtagaatgcagtggttaattctccaagttctagaatcagagtcgccctgggttcaaatctcaagcaaatgaccacctccctgagcctcaatgtcttttgtgaagcagtggttaaaacctacccttggccaggcatggtggctaacacctgtaatcccagcactttgggaggctgaggcagaagggttgcttgagcccaggagtttgagaccagcctgagcaacatagccagacccctgtctctaaaaaaaaaaatagaaagaattagccatgcatggtggtgcacacctatagtcccagatgctcagaagactgaggtgagaggaccgtttgagcccaagaggttgagcccaccacacttgtctaatttgtgtgtgtgtgtgtgtgtgtgtgtgtgtgtgtggagacggggtcccactatattgcccaggctggtcctgaactcccgggctcaagcagtcctcttgctctgacctctcactgtgcctggatacaggtgtgagtcacagtacccagctattaccttctaacctactcttcaatttttgttgttatattttttattattgtctgtcatctcccgccccattatcaattccacaaaggcagggatctaggtctattttgtgaactaatgttagttccccacccctgctggcctccaggcctagagtagggacagaaatcatttatgtggtgcctactgtgtgccaggcctacagtaggcaccacatgaaagatttttttttatgttttgagacggagtctcgctctgtcgtccaggctggagtgcaatggcacaatctcggctcactgcaacctctgcctcccgggttcaagcgattctcctgcctcagcctcccgagtagctgggactacgggcgcccaccaccactccaggctaattttttttaaaaattatttttagtacagacagggtttcaccacgttggccaggctggtctcgaactcctgacctcaggtgatccaccggcctcggcctcccaaagtgctgagattacaggcgtgagcccccgcgcccagccatgattatttctgtctctgctctcgctgggggaaggcacagaagctgtaccagtttcccgtgatgtccccagcctccagctcagtgcttggcgaacagaaaggagtcaaaggcagcagaaaggagtcaaaagcaggagtcaaaggcaagtgccccaatgggcacttgctcagtccctcatctccaccctctcgcaggtggctggtgtcccgcgatggccacaggcgccctcctgccgtgctcgcgcccgtgcccgatgtcccggctggacttcctcaaggcctcgcacttctcgctggggcctgacctgcggctgcacgagggcaccatgcgcaccacgtcgcaccgggactttgcctacccggctgccacccgggagccgccgagcctgcagccgccgcccgcgctgcttttcccaatggacccgcgctgggaccgggaagagcgcgtgtcggaggcgcaccgcgcgttcccgccgccatccacgccgccgtgggagctgctgcaagcgcaggcgcgggaacgcacgctcgccatgcaggccggcaacctgcacctgcacgaggacgcgcacgccgggatcggcctctccaacgcgcacgccgcctacggctggcccgagctgccggcgcgcacccgagagcggatccgcggcgcgcgcctcatcttcgaccgcgactccctgcctcctggcgaccgcgacaagttgcgcatcccgcccaccacgcaccaggcgctctttccaccccacgacgcgcgcccgcagcctcgcgcgcccagttgccacctcggtgagcgcgcgcccgggctgagtgggcgatttgcttcacattgtggttctcaaacaggggcaagggctcttcattccccttcccccagggaacatttggcaatgtctggaaacgcttttggtggtcaggacttggggggtggccgggcgcggtggctcaagcctgtaacctcagcactttgggagttggaggcggggggatcgcttgaggtcaagagttcgagaccagcctggccaatatggaggaaccccgcctctactaaaatacaaaaattagtagggcgcggtgaagggtgcctgtaatcccagctacttgagaggctgaggcaggagaatcgcttgaacccagggggcagaggttgtggtgagctgagattgtgccaccgcattccaacctgggagacagagcaaggctccgtctcaaaaaaaggaaagaaagaaaggaagaagagaaagaagaaagagagagagagagagaggaaggaaggaagaaggaaggaaggaaaacaagacagagaggaagggagggagggagggaggaagacttggggggtggcgaggccacccgcggtggctcacgcctgtaatcccagtgctttgggaggcctaggcaggaggatgtcttgaggccagaattggagaccagcctgggcaacatagcgagacccatctctacaaaataaaaattttattatttttttattatatatatatgtgtatatatttttttgagaaagtgtctctgtcacccaggctggagtgcagtggcatgatctcggctcacacagactaaatctgcccagctcaagtgatcctcccacctcagcctcccaggcagctgggactgcagacacgcatgtcaccaggcccagctaattttttgtacttatttgtagagatgcagtcttactatgttgccctggcaggtcttgaactcctgggctcaagcaatccatctgcctcgacctcccaaagtgctgggattataggcatgagccactgagcccagcccttacaaaataaaaatttaaaaagatgggcagaggtgctaccagcagacagcgggtagaggccagagatgctgccaagtatcctcccagccagccccaaatgtcaattacaccaagcctcagaaaccctggaaccaccttgagcatcagtttcagcatcaggagggtggacatatcctctgaatctgtccagagtggtgcatggttggcagaagtcatgaatgccagtttggggtcagacaaatcagctaagttccccagctgtacaccctcctccccacaccccccagccttaccaccttagtagctgtgtgagtctgagggagttaacctctccaagcctcagtttccccgtctacaaaatgggtgcaatcacagggcccaattcacaggagctagtaaagctgaatgtgtatggtgtgtctggtgcagagagcacttaacaaagagtagccagcattcgtgtaattttccaattctgtgactccagggaccctttgggtgaacattactggtcagaggcccctaagatgggctcagggattgtcaaaccctgatttgacatttagttgtgattcctagtttctgtgatttctggcaagttgcttaacctctctgagcctcaaggaggctgtaacaagagaaatgataccaggtccaagaagaagttgcggccgggtgcaatggctcatgcctgtgatcccagcactttgggaggctgaggcaggcggatcacttgcggccaggagttggagaccagcctggccaatgtggtgaaaccacatctctactaaaaatacaaaattcagcctgacctggtggtgcgttcctgtaatcccagctagctacttgggaggctgaggcaggagaatcgcttgaacctgggaggagcaggttgcagtgagtcaagattgtgccactgcactccagcatgggccacagagcgagactccatctccaaaataaaagagagacggagagagagatactcagtcctggaaaaagatgcaatgcacttaacctatgtgtggctcaatatagtccttggtagatattattggggtttttttgttttattgtgtgtgtgtgtttttgagacagaatctcactctgtggcccaggctggagtgcagtggcacgatctcggctcactgcaacctccacctcccaagttcaaattattctcctgtctcagtctcctgagtagctgggactacaggcacatgccaacacacccggctaatttttatatttttggtagggatggggtttcaccgtattgatcaggctggtcttgaactcctgacctcaggtgatccacctgccttggcctctcaaagtgctgggattacaggcatgagccaccacacctggctgtatttttaaatttatcattattttttagagatgagggtcttactatgttgcccaagctggtctccagctcaagatgggctcaagcccatctttgcacttcagccacctgaatagctgggattacaggcatgggccattgcacctggcttttagtataatttattttatttttatttttatcttttggtgtttgccagacagctctcagtctacactgttcagaatggcccagctccccttcccaggcaagaaatagaattccttccagagggcttgagatggcagggaatctcaatctctctctctctccccccatcccccttgcctatcctaagggggccccaacaccctcaagtgggactacacgagacaagatgggacttcctaccaaagacagttccaggccctgccaggcccacctgccttgaggtgtaagagggtaaattgaggctgtgttggggctgcaggcgggggcagaattgggggctgggtggtttgggccttcctatccctgtctgcccacaggcctcctccggagtggagctgggagactgcaagatcagctatggatcaacgtgttcggagcagaaacaggcctacaggccccaggatctgcctgaagataggtataaaggggccactgcgggcacggtggctcatgcctgtaatcccagcactttgggaggctgaggcagacagatcatgaggtcaggagctcgagaccagcctggccaatatggtgaaaccctgtctctactaaaaatacaacaattagccgggtgtggtggtgggcgcctgtaatcccagttactccggaggctgaggcaggagaatcgcctgaacccgggaggcggaggctgcagtgagccaagattgcaccactgcactccagcctgttcgacagagcaagactccatctcaaaaaaaaaaaaaaagtgggggacgagggggcactgccttcccacccagatgggacaactggctttcagtagcatgtggtatttgccccttagggctttagggcccatactctgcctctgaggtctctgtcactggtagccaaggtgcactattgtgccagatctctcattatcagagccccacagcttggtcattaggaaaccctgctcccctccctctttctgggggttgcaaggccccagatggatccactttagcttcttcttcttctttttttttttctttttttttttttgagacgtagtctcgctctgttgcccaggcttgagtgcagtggcacaatctcagctcactgcaacctccgcctcccgggttcaagcaattctcctgcctcagcctaccgagtagctggaattacaggcatgtgccaccatgcccggctaattttgtatttttagtagagatggggtttcaccatttttgccaatctgttctcaaaagcctgacctcaggtgatccacccacctcagcctcccaaagtgctgagattacaggggtgggccaccatgcccagcccactttaccttattcttgatggaataatacactacgtacaggtatgacaaggcccaggccacagcccacatccactgtgtaaatatccgtcctggtgacggcctcttccgcgacaggaccaccaaggccgagcacttctatgccagggagccaggtgagagcctgaggcccgccccgtcccgcctcccaccgcagcctcccagggcagctctgcacctgttccgcttctggcagagccttttgttcttcaccacgatcagactccggagtcgcacatcctgaaaggaaattggtgccccggccccggcagtctggacaccttcatgcagtacttctacggccaggtgagcaggaagagcgaaaaggcggcagggaaaagggcttcccagacagagcaaatagcaggtgcagaagtcccaaagtgggagtgagcttgatatgtatgcaggaatctcctggatgtacttgagtgatctagggcgagtcacttaaccactccgatcctcctccgtggctccttctgtaaaatgagataagagtaccaactcccagtgctaccaggtggggcccagaaggggtgagggagctgtccaaggtcacacagagcccacctcctccctcccccccgggcccggggacctctcggacgccggagctttcaaatgccatgtggtcctacagccgccacccccgacccagccacccagccgccacgtgcctcatgagaaattgcagagtcatgtgaccctaggggagccaaagctactcaaacgcttcttcaagaccaccatgggctcggactactgcccttcagagtggagacaggtgcagaaagcgcccaacctccacttgcagcaaagctacctgccgcggggcacgggcggtgagcgctcccgggaagccccgccccatggagccccgccccgggaagccccacccccgaaagccccgcccccatggagcccctccccatggagccccgcccccacggagccccgtcccgggaagcccagccctggaagcctcgcccttgccactgctctggccccgcccctaaccagccctcccctcccccggcttcatcccctgaaaggctaaatcccacccccaattgaccagaaccccaactctgctcctggataatcccgccccttcatggccatgcctctccccttcataactccatccttctggacacggccctgccccttctccatcctctcttatccagtcttaactcctcttccattgtcagactctggctccgcccctgacccgctagcctgccctgcctggccctgcccacagactcatctggcccggccccgcccctgaccttcttagccctatgccctagctctgggttcctcccctagctcctccgtcctcctccagctcctccctcttcccaagctcctccccctttctctggctccttcctttgtcccagctcctccctctttcccagttcctccctcttccccagctcctctctcctcccctggctccttcctcctcccccacctcctccctcttccccagcgcctacctctttcccagctcctccctctttcccagctcctcccccttcctctggcttctccctccttctttggctcctccctcccccctctcctaatccatttttctcccctggtcaacttcagcgctggcctgggcttggctcttgaacccttcccttgaacttcaccacaccctcagccccgcctcggcccacagccctcactcagcctccccaacctgaatctccagaattcgattttttaaccatgaaccagaagatgctgaagccacacagaacacctccggccccggtgactgaagagatgctacagcgggtaagggaggcggaggggagccacccatcattaggcaacccccacattggtgtagagttatctcaggacgactatgctgtcaccctgtctcagagttagtgatcacccaggctcgggggcatcttaatatcccttcagcctgaagatcatccctagcttggccgggtgcagtggttcacgcttgtaatcccagcgctttgggaggccgaagcaggcggatcacctgaagtcaggagttcgagaccagcctggccaacatggtgaaaccccgtctctactaaaaatacaaaaattagtcaggcatggtggcgcatgcctgtaatcccagctactagggaggctgagacagaattgcttgaaccagggaggcagaggtttcagtgagccaagatcgcaccattgcactctgggctgggcaacagagcaagactctgcctcaaaaaaaggaaaaaaaaaaatagaggtcatctctagctcaccccccagggtcatgtcaaggtcagctcaggggcatctttgcaccaccaccactgttatacccaagacgagggttaattcagagccacccaggatcaccccagccctggagtccttccagggacacccctggtttctctccatcttcttatccagctcctcattcagcccagcctggggccctttttgcccacctctccccagagttcaacctccccagcctttgatgctctggctctgtccctaggcggccccaccttaccccaggcttcaccttctgaagggctaaatcccaccccaaattgaccagaaccccaactccgcccctggacaatcccgccccttcgtggccaagccccgcccctgcataactccacccttctggccatagcctcgcccctttccctatcctctcttacccagtcttaaccatcctccttggtcagacactggctccgccccgaccagctagcctgccctgcctggccccgccccctgactcatcaggcctggagatcctggggtggacagggtggatcggccacctcccaggctgccctgccaggctgtccaccctgtctccacagtgcaagtacagccacatggagccccctctgggtggactgcgcttcttctcaacacaatacaaggacgagtttcctttcaagtaccagggcccagcagccctgagactgaaaaatcctcaggagggcttcgtgcccctgggcacgcctcaccagcgcggctgcagggagaagatagaccctctggtcccccagccccctatgtacctgtgccccagccagcaataaatgccatcttggcaacattccactctttcccatcagtcagcccatccagaggatgcttgggtgggtgggggctggaggaagggactgcacgggaaaggatgactccactgttgctgcgttgccatgaagagtatggagtcaaggctgggcgcggtggctcacacctgtaaccccagcactttgggagactgagatgggaggattgcttgagcccaggagtttgagatcagcctgggcaacatagggagatcctgtttctacaaaaaaaaaaagataatcggccaggtgcagtggctcacacctgtaatcccagcactttgggaggccgaggcgagcggatcacctgagatcaggagttcgagaccaacctggccaacatggtgaaaccctatctctactaaaatacaaaaattagccagatgtggtggcacatgtctgtaatcctagctactcgggaggctgaagcacgggaatcacttgaacctgggaggcggaggttgcagtgagctgagatcacaccactgagctccagcctgggcagcagagtgagactaagtcttaaaaaataaataaataaataaataaaaattttagaaagccaggcatggtggtacgtgcttgtagtccaagttattcaggaggctgaggtgggaggatcacttaagcccagaaatttaatgctgcagtgagctatatgattgcaccactgcactccaatctgggcaacagagcaaaaactctgtctcaaaaaaagaataaagttatagtgctgaacagagatactggcgtgcgtacttcagaacacagatccctggggccggggaagggtgggggtgctggatgggcataatccaaactcggactcctccacgtcctgggtggtagtttgggcaagtcacttaacccctatgagcctcaatttgctcatctatgaaatggggataagtagcaattctcccatgagactgttatacatgagaaatgtacacacttttcagtgcatggggctggggtcgtggaggggaagcttcccttctgaggatgagaatggggaaggccagggtgtggggaaaaagctttcaatggtggggacactggatgtggcccatagaggacatggaagagtggacacagctgagaataacccagcagttttttccatcatggacagagactagagaccgaatggggcactggttgtctgggcaactggtccccaggtcagagcagagtccaggggcaaattgacaaaagccatcaagatattatgaggtccaggggggtaagtgttcagccagggacaaaatgtaaagggtcaaaaggaggaggatgtgatggggctctgcagcaagtgagtgacagggcttagcaaggaccagtaccttggacagcgcctgacctttaaggtccagggcatggtgaggagaaaggtctgtctggggtaaggtctgtctcgggtaaggtaggctttagtgaccatgccggggcctgcctctgtgggctgttgaacatccagtctcaaggagtgaacatggctttcctgaaccaagaatcaaacctccaaagaccaaggaccccaatccaatgaaccataaggttgagccaatctcgaccctgcccaggagccctttcctggttggcatcagttcttctaggccaggttgtcatttctgcaggaaaggcaggagggaatccagctttgcatcctgtagggacaagatgacccttttggccacacatggtatccacctcgaccatgcaagaatctgccagctgtgaatatgtcctctaaagatatttggcatcatgctcttctgagttacttcaggataaaccagggcttatcatttatcggtgtcttagatcagatcattctttattggaggctctcctgtgcattgtaggatatttagtgccatccttgtcctctacccactaaatgccagtagaacctctccctcccacttgtaacaaaatgtcccaaatattgccatatatcttccagatgggagagaactgccctggttggaaaccacttcgataagctcatcctcttctgatgaagctggtctgcctagtgaccagactactagaacagaaaggctttccctttttgccttgccttctgggaagctcagaatgtttatttggtcttaagttccatgtagctgtagttgcaggattatcttcctgcctcatcccaggaatggtttaaaacagccttaggcattagatgaaaacagtccatagcaattaaaaaagagctggatttcagcacaacttggagcactttctgacaatgaaaatgaccagccctaggatggcttgccagggaagaacagaaactgtactggaaatgtttaatccttggggaaagacactacatcaggattattctggatgtattttatggatttatgactaaccctcctatattccactcactcccttccttcccccaaaagcctagggattaagacaaaaaaatatagaattgaatgtgagaaaccaagatttttttttttttcgaaacagagtcttgctcttgtcacccagcctggaaagcaatggtgcaatctcagctcactgcaacctccgcctcctgggttcaagcaattctcctgcctcagcctcccaaataactgggattacaggtgcccaccaccgcgcctggctaatctttgtatttttagtagagacggagtttcaccatgttgctcggctggtcttgaactcctgacctcgtgatctgcccgccttggcctcccaaagtgctgggattacaggcatgagccaccgtgcccagcccaccaagattaatttttaaaggaaaacaactttctcagtggtaagcgtcacccagcagcagaattcagacctgcctttctgtccttaggcaaaaatacaccctgaccctcactttccttatctgtaaaatgggaatgccaatagttcccgtttcatagagtggttacaggaattaaataagaggtgcatgtaccatgctcagaagagggcctggcacttggctgcagctcagtgaatggtgactaaatgtgttaatgtcttacgtcattttgttgcaaatgacagaaaccaagctccatctggctcaaggaaaaaaaggaattttattgatttagaaaaagacaggccagacgtggtggctcatgcctgcaatcccaacactttgggaggctggggcgggaagatcacttgaactcagaagttcaagaccagcctgggcaacatagtgagatctcatctccactaaaaataatttagaaaattagctgggcatggtggtgtgcacctgtagtctcagctacttgggaggctgaggtgggaggattgtttgagccaagaagattgagtctgcagtgagctattatcattccactccagccttggcaactaagcaagtttctgtctcaacaataacacacacacacacacacacacacacacagacacacacacacacacagaaacaagaaggtctgagtctggaattgggtctaatatcaggcattttgcatcaggactctgtccccctggccatctctcagtcctgtgtccctccaagcaacagcaaaggaagatgctggtagtattttccaatcattatgattagatcccccagagaagggcggggtctttccaccacgctccctctatcgaattttggtttttgttttgagacatctgtcacccaagctggagtgcagtgatgcaatctcggctcactgcaacctccgtctcctgggttcaagcaattctcctgcatcagcctcccaagtagctgggactacaggcatgcaccaccatgcccggctaatttttgtattttttattacagacgggatttcaccatgttggccaggctggtcttgaactcctgacctcaagtgatccgcccgcctcagcctcccaaagtgccgggattacaagcatgagccaccacaccgggccccatattgggatttaaggaacaggctgattggcccatttgaatcactcaccgagttgtggaccaatcactgtgcccagaggaaaacaatatggtgattggtttgcccagctcaggaacccacccctaggttatttaactccccaaacccagccaggatcacggcgctggagcccaaccttaattgactgtgtctcctaaggacaaatctgtgtcctgccccaggttgcaatctggagggtggattagctcagctaataggctcttcccagtgagagtgattgtcagctttgcagacaaggaatgttcagcgtttgggagtagtttagggtgtcagatgtcctcccataatcccagtcttatcttctacctcatcatctgcctcgtcttttagcctggggcggaaaattcagctctgaggttctcacaagatgaagcagatgattctctgctttgagaagaaacacattccagaaacttgtgtctttcttgcaagactttgctgaagattgcatgaaagctgccccaggccaggcatggtagctcacacctgtagtcccagcaagttgggaggatcgctgaagtcaggagtttgagaccagccagggcaacatagtgaggttccatctctacaaataaaatagtaataatagccaggcatggtggctgtagtcccacctactcaggaggctgagtccccaggtactcatctgtagtcccagctactcaagaggttgaggtgggaggttggcttgaacccaggagttcaaggctgcagtgagctatgattgtgccactgcactccagcctgggtgacacaatgagaccctgtctctaaaagagaaagaaagcttccccatattccaatattctggtccttaggagacacatggttagagttccatgaaaaaatcagtaactatttatttatttatttatttattattcatttatttttgagatggagtctcgctctgttgcccaggctggagtatagtgtggcacgatctcggctcactgcaatctccacctcccgggttcaagtgattctcctgcctcagcctcccaagtggctaggattacaggtgccctccaccatgcccggctactttttgtatttttagtagaaatggggtttcaccatgttggccaggatggtctcaaactcctgacctcagtgagccgcccatctcagcctcccaaagtgctgggattacaagtgtcagccaccgcgcctggccaggcaacaatttaatccgctggttttcttccacataactctagttttctgggggaaagctcttttacaaagccccgtatacatctagacaggtcgtgcattgcataacttaaggtgccctattcactttatagtccatgtatgtggcaaccctggctctctatcccatctttctttagtttgttccacattttagggttttttttaaaagattttttttattactctttcctttccaggtaataattcctaaattagtcaagactgtcacggatgcaaagaacagacatccactaaaaccagctcaaacacccagaacatttgttggtttgtggtacaggaaagaatgagttctgtggcttcaggtacggctatatccaggagctcaacaaatatagccagagctatctctctgactcttacttgtacatcttggtgcatattgtcctcagtctgcagaccgttcttttgaacaactggggaaagtggctgcaggcagaatgagccccctgtggctcataaccccagaagtagagtgagaacctccaatgtcaccttctcaacccatacctaattattgtggccaggggataggggccctttgattagagtccagctcacgtgggactgggaaggggtgttagacacatgtgcatctggagtagtggaggggaccccacaaaggaaaagaaagtactgttagattctgagccaaagaaacaacagatgtcatcacatgtatttgtaatgggatcatccaggaagtgtcaggataaggaaccaggggcataatccaattgaagttatctccaatctctcagatctgctgtgggctctgcggaaagatggaaagcaggtctcaggctgagtctaacacacatctagaaggttcaggaaggaagaaggaaccatagggtgtctctataaggaggacatggggacagaggagtatcttatagaatttgggcttgtacttggtggtttgcattttttgttttgtttttgtttttgagacggagtctcgctctgttgcccaggctggagtgcagtggtgcaatctcggctcactgcaacctccacctcctgggttcaagcaattctcctgcctcagcctcccgagtagctgggattacaggtgcctgccaccacgcctggctaatctttgtatttttagtagagacaggatttcaccatgctggccaggctggtctcaaactcctgacctcaagatccacccgccttggcctcccaaagtgctgggattacaggcatgagctaccgcacccagcctatactgggtggttttacagagaattactagggtggtattgtcgggaacctgggagcgctttgctgactaggtatttcagtgatttttgtctcagaggtgggaggatggcagttgggttggaattgtcgtcggtaagaagtggcagtcatttgtgttcacttggagagggggatgagaactcatttttgtggttgcacagggcccatgtctctatcttggttcagacatggtcacagagtggccttgcctcatcattgtttatattctgtgaccattgtttatatttagtggagaacatcgcggcccagccatcaggagctgatttccactctctctcctggctggcagcggggatctgtgtctccaaggaaagtttgccccgagcccttcccggcccggcgtagggttctccggaaaccatcactcacatctagcacttggaggcctccagggacagcggtgacccaccatctgggtaggaggctgaaaacactagaggaggaatatcccaaatctgtgccttggcgggtgttacccagaaagggtgacgggtttcaccatgcaaaaaggaaaaattggaggaaggccaggttaagcaaaaatagacatgtttttagattgcagagctgagaggcttggctgtgcctatgtgcgctgcaagtctccaagaacaacatgtgtagagttttacgaacaaagatagagtcagagacatgggcaggaggcagagacagagagagagagacagacagacacagagagagatagaggcagagaaagcaacagaggcaaagagattggaacacagagaaagagatggggacagagacacagagaaaggaacagagatgggaagacagggacagagacagagaatgaacagagatagagagatagggacggagagagacagagagagggacagggatggagagaaagagatagggccagggccacagagggactgagacaggcccaggaggagactagggatggggccagggctgcgtgcgggcggggcacggtgcagacaaaggcgcggccgcgcggtcggggtggcctggccggggacaaaggcctgcccggggggcgggggcagcgatggcgacggccgcggcgggcgcgggcgaactacaagtcccagcagctcccgctgcggccctcggccggcccctctcgctccccgggagcgcctggcggggccgctgggccgagggggccgccggcggggctggcgggcggggggcttcctgcgggcccggggggagccggcggccggcgcgggcgcggcgggccgggcaggggcgaggggcgccgggtgagtgtccctgcgagcgggctggggccggggcggggggctgggtggggggcgggcgggcgggggagctccaggcgcggggcgcagcccggggcgacctctaatcgtcccccgccctgcgcgccgccggccctggcccaggcgagcgggggtcgcgggagcgatggggaggggactctgcggccagctccggcctagcgcacccatcccgccgctggggcccggggggaaagggccaggaggttgggagccttcaatcgggcggggtggggggcgcccgccagctctggggtctggagctcaggacgccccctccctaggaggcgatccaggaccccctcccctcctgattcgaggtattgttcccacctcccgcctggggtctggagttcaggaggccctgtcctcaaaagggggacctaggggttccctcttcccccaggaccctaggaagggtcccagcgattgttcccttgcccctccagtcttggggtctgcagttctggaagctcctttccctggaggtgatccaggggtccacctgccctcacccctgggaactcaggaaagacttaagtgatttctcctcccaccttccagttaagagatgggaattcagggggctccttcccctggaggcaatctaagggttcctctgcccctgatgcaggaggggtcccaggtcttgtttcccccactctccaactatggggtctgggttgaggaccgccgtccaggaactcggctctgtttgcctgcacactcccagctatggggttgtggctcagtgtattcctttccccagaaggggagccacaggtccccccacagcttctcccaggagcagatcattcattgttgacacctcaacacccagccatggggtggggagctcaaggcatcctcccggcaggtcatcctgggctcccattgctccccagaagtggttccagcttttgtccctctacctcccagtctgcccctagccacaagctggcaattcagttcaggatccttcctgcaggaagggctacaagtgtgctgacactacccgccatgtcccagccatgggaggagatgactcaggcgttcccccattaacttcagagggtccccaggtattatttttgcctatcctccagctagaagttaaaatgcaggaccttctagccaatagggaaaacaggtatactggccgggcatggtggctcatgcctgtaatcaccatactttgggaggctgaggtgggaggatcatttgagcccaggagtttgagtccagcctgggcaacataccaagaccccatctcaaacataaataaataaataaaacaggtatactaacaactgtccccaccatcctgcctatggggttcatgagtctccctacccatccctcctcaccaggaggggtcccaaatatcactctaccatgctcactatctggctgtaggaaagggcatttccgatctgtctaagagagaggatttgacactgactcccacctggagctgtgagctctggaattcaggttttcttttccccagagggcaagccagagtcttcttgtctttccccagtgacttgggagggatacctgatgttatttgttccatattcttatcccccagacatgggttctagagctcagaatgctgctgctggaggggggcctccctaccagaactcgccccctaaattaatctgccgcctccaagtatgggacaagaattcaggccatgtgctcaggagcacagaaacgctgacacccacactgttccccatgtggggacgcccagcaagggggtaggaagctaggactgtctcctccacaggaccccagcttcccacaagaggagcccaggttggagagaggtgcagagccatggagttggggactagaaacctctagtgctgggtctcatgacctccgtccaggtttggggctgagaggggagggtcctaccatgtcccacctggttccctcaactccctgccctggctggggtaagtcagaaatctccttgcagtcagagacaagggaaggatccacgtgtatgctcagaagtgagtggggtttggccaggcacagtggctcatgcctgtaatcccagcactttctgaggccaaggccagaggtttgcttgagtccaggagtttgataccagcctgggcaacatagcgacaccccatctcaaaaaagagagacagagggagagagaaaggaaagaaggaaggaaagaaggaagaagagagagaaggaaggaaaagaaggaaggaaggaaagaaagaaagaaagagagagagagagaaagaaagaaagaaagaaagaaagaaagaaagaaagaaagaattgaagttagctgagtgtggtggtgcatctgtaattccagctacttgagaggccgaggtgggaggatcgcttgagcccgggagttccagtctgcagtgagctatgtatgatcacatcactgcactctagcctgggtgacagagtgagaccccatctcaaaaaaataaaaataaagaagtggggctgggcgcggtggctcacgcctgtaatcccagcactttgggaggctgaggcatgcagatcacctgaggtcaggagtttgagaccagcctgtctaacatgctgaaatcccatctctactaaaaatacaaaaattagccaggcatggtggtggacacctgtaatcccagctactcaggaggctgaggcaggagagttgtttgaacctgggaggcggaggttgcagtgagccgagatggtacctttgcactccagccttggcaacagaacgagaccccatctcaaaaaaaaaaaaaaaaaaaaaaagaagtgggttctgggggcacaatcgggtcccgtctctcatccctaaccagactccaaaagacacccccgctcccacagaacccacctaccctctaccctctatccttgcccttgcaggtcttgccccagaagctgcgggcacatccacgcctgaaatgcggcgctcagtcctggtcaggaacccaggccacaaaggcctgagacccgtttatgaagagctcgactctgactccgaggacctagaccccaatcctgaagatctggacccggtttctgaagacccagagcctgatcctgaagacctcaacactgtcccggaagacgtggaccccagctatgaagatctggagcccgtctcggaggatctggaccccgacgccgaagctccgggctcggaaccccaagatcccgaccccatgtcttcgagtttcgacctcgatccagatgtgattggccccgtacccctgattctcgatcctaacagcgacaccctcagccccggcgatccaaaagtggaccccatctcctctggcctcactgccaccccccaggtcttggccaccagccccgcggtgctccccgcccccgccagcccgccccggcccttctcctgcccggattgcgggcgagccttccgccgcagctccgggctgagccagcatcgccgcacgcacagcggcgagaagccgtaccgctgccccgactgcgggaagtccttcagccacggtgccaccctggctcagcaccgtggcatccacactggggcgcggccgtaccagtgcgcggcctgcggcaaggccttcggctggcgctccacgctgctgaaacatcgcagcagccacagcggggagaagccgcaccactgcccggtgtgtggcaaggccttcgggcacggctcgctcctggcacagcacctgcgcacgcacggcggcccgcggccccacaagtgcccggtgtgcgccaagggcttcggccagggctctgcgctgctcaaacacctgcgcacgcacacgggcgagcggccctacccgtgtccgcagtgcggcaaggccttcgggcagagctcggcgctgctgcagcaccagcgcacacacacggccgagcgcccctaccgctgcccccactgcggcaaagccttcgggcagagctccaacttgcaacaccacctgcgcatccacacgggcgagcggccctacgcctgcccgcactgctccaaggccttcggccagagctcagcgctgctccagcacctgcacgtgcattcgggcgagcgtccctatcgctgtcagctctgcgggaaggccttcggccaggcctccagcctcaccaagcacaaacgggtgcatgagggtgcagccgctgctgcagctgccgcggccgctgcagctgcagcagcggccgccggcctgggcctcgggcctggcctaagccctgcatccatgatgaggccggggcaggtctccctcctgggtcctgatgctgtttctgtgctcggctctggcttgggcctcagccctggcaccagctctggccgcaaccctgaccctggctctgggccgggcactctgccggatcccagctccaaacccctccccggctccagatccacccccagccctactcctgtggaatcttctgacccaaaggctgggcacgacgctggtcccgaccttgtgcccagcccagaccttgatcctgtgcccagcccagaccctgatcctgtgcccagccctgatcccaaccctgtgtcctgccctgacccctgttctcccactcgtggcactgtcagcccagccctccctaccggcgagagtccagagtgggtacaggagcaaggggcactgctggggcctgatggctgaaggagacgccggcatcctcgggggcctggggaagttgtgtgttgtgcagtcagtaaaatcctcccactgcctccgggctctgtgtcgtggcttgccttttgtgctttctttctgagcacagccccttgctccggagatgggacattgtggccagggccagccacaatctggagctccagtgtcctggcttccttcttgggcccaccagctagactttccagcttaacccacagtgtctcatcctggtccatcccactagtcaccactctctgttcctctcacttaccccttgctcttcaaagcccatacagtaggtatacaagtggacaaaaaaagttgctcatttatgcaatcaacaaacatctctggattgctggggtctcagcagggaacaagataaatatggcctcgacctgcatggagctcatagatactaaattcagaatacttaaaaaataattacggggtatagtacattctaggagaagcataacaagacttctgatataaatggcaggcagctttctcaatgaaggattttgtaatcccaataatcactaatttaataatcagtactgtttgcccagccttatgcgatagtttttgcattctctcatttaatcctctcaacagccccagtaggtagatgactttgaatatccccattttgcaaatgagaaaattgaggcacatttttttttttttttttagacagtcttgctctgttgcccaggctggagtgcagtggtgtgatcatagctcactgcagcctcgacctcctgggctcaagcgatcctcccaccttagcctcccgagtagctgggattgccggtgcatgccaccgcccactgcgctcagcttggagttgaagggactctggaagatgtagaagtggcattgtcagtgcctagatttaaatcccaattgccctccagggtccaaattcttaaccattacgctccagggcaaaagtatgcaaaggctctggggctatagaaagatgagctttggatggaggtaggagccagatcagagggccctgatagacgagagtggggactctgcctgtcattacagagcaatgggaagccgagggcaggttctcgcaggaaggataggaattattctttgaagatgcttgtggctgctgggtagagagtggagtggagggaggctgagatcggggaggaggttgctgcaaagatccaggccaggaatgttggaagactctgggctgggggccatggggtggggataagtggttctatttgatacataattaggaaatcgtgtttgctgaagatgcgcaggagaagggtaaaaggagtttctgggagaaagaggaagacagcgttgagatagtaggcagggtcatcaccaggcaccaaggaggataaggggtcaagctctggacatggaagtcacaagcctggcaccggattcggggcatggccgggagccagggcagagctcgtcgttgccaaactcagagtcagcccatcccccgccacccagagcgcgtcggcgctaggacctagcgactgccttcgacccagagggcgccggcagaggcacgcatgcgcgctgttccggcaggggttgtcgtggcgcagggggcgggaccagaggcggtcacgtgaggggctctgggctaccgggtcacgtgaccgaggcacagatcagctgatgccggagggtttgaagccgcgccgcgagggagcgaggtcgcagtgacagcggcgggcgatcggacccaggctgccccgccgtacccgcctgcgtcccgcgctcccgccccagcatgacagccccggcgggtccgcgcggctcaggtgagggcgcgggcggcaccgtggggccccgaactcaggcgggcgggctgtgtctcccacctggggcggcggagctcctagtctctttttttctaagctccagcgctgacttttcacggtggagaaaagggcagacggctcctagaacttgggcggcgggtgggcaccagcctctccaattcttcctcctgaacccaggctctgctgggttcccaaactcaggcagggatcgcgccgggccgccagcttctccctctggggcggcgaggttcctgggattcccactgggagcctaggttccgattgctcaacttcgtctggaactcagacagcgggcaccagcttctccaacccgcacgtgagactcccaggcttcccctcctgattccaggggacaaatgctcagcttccctaagctcaagcctggagagctggagggattgcccccaggcgattaactcagttttagctttccaaaccgctggaagcgcagccttcttaaattcgggcttctagccaattctgatgccacccctcctcggggaggctggaggaagaccccttgtgttagcttccccttctggagctagctggggacccctacctgatagatgtcccggtgtcccagctagtagggtctggggtgggttagctgtaatctcagctctgtaagcgggccctgccctctggctttgtcgtaaacagccacagcagcatctcattgcaaagggaggggccgggaacttgtccctctctgcaagggaggttctgacagtgcacacatttatcctgactgctttgctaggcaggaggccaggccctagaaagcagcacggggccaggccctagaaagcacatccccatgggggtgtgacagggacagttttgggctactgtgactggttttgactccagcagttgctgaaagcttagatctaaccattaggctggaaaaaaataaacagtgattagaacagcttgtgtttgctgaagaggtctttatctgctgtgtctcactgaattctcagagcagcttcaggatctcaacctcaaggctcagggagagggtggactttttttttttttaataaacttttttttgttgcccaggctgtagtgcagtggcataatcctagctcattgtaacatcgaactcctgggctcaagtgatcctcccaactcagcctcccgggtagatggggtcccagctactaactacgggcatgagccgtcacacctgactatttaaaaaaaatgttttttttttgtagacagggaggtctcgctgtattacctaggctggatcctcccaccttggcctcccaaagccgttgggataacaggcatgagccactgagcccagccaaggggtcgcctttttaaaatttccactcttcagatgaggagatggaggctcagggaggtacctggagtcaacctactgtaaagtggcaggtctgggatttgatgctagggctgcatgatttctaggagctggtgcttttcagggagataaaatgagtctttagcgaatgtgttccattattattacttatgttgtcaattacctcttctccaggtccttggcttctgagagtgtcagctgatgggccaggttataatgaacccagaggtcatcttttgggtatttgtccagacaaacctagaatacaggctgagttctatgctcatgtctggaagctggagttgggataagcccagcaggcttgaacgcccagtgaaaagccagtgggagcagttcattctctccccactgatcaataacgggaacattgatgaaatgttctgacattcaccatggaccagcccctgtgatcaatgcttcataagcatccagtccttagcgttcccatgagacatattattgccccatttcgcagatgaggaaactgaggctcagagagctggtgagcaggaggggcaggaatcagcccaggccctgtacctcccaaacccaaactcataacctctgagcaggacgggtgcatagatacctacaatgtcacaggttttctggttttctttagacctctcagagctcttccttggcaggagcatggggacatgaagatagggcgtgtgctgccttcctggttggagaaaggggaaaaggggagttgcccaggcctcaccccagtgccctctcctattcccacagagaccgagcggcttctgacccccaaccccgggtatgggacccaggcggggccttcaccggcccctccgacacccccagaagaggaagaccttcgccgtcgtctcaaatactttttcatgagtccctgcgacaagtttcgagccaagggccgcaagccctgcaagctgatgctgcaagtggtcaagatcctggtggtcacggtgcaggtgaggccagccaagcaggggccccagctgaaggccacctgtggctgctgtgctccttgaagagagtcttaaagcagcactttggaaggccgaggccggtggatcgcttgaggctgggagttcaagaccagtctggccagcatggtgaaaccccatctctactaaaaatacaaaaaaattagccgtgcgtggtggcgggtgcctgtaatcccagctacttggcaggctgaggcaggagaatcgcttgaattgggaggcggaggttgccgtgagctgaaatcatgccactgcactccagcctgggcaacagagcaagactgtctcaaaaaaaaaaagaagccgactctgaggctcagagaggttaggagacttgcccaaagtcacacagcaatagaacattgggagctgggatttgaacccaggcagtctgacaccatgttgacccaatggctgcacagatagttctccctcccccatgccagaccctgtgctgggctctgggaaccccaagatgaatcagacccagccactgccctaagtgcttacttcatgttttgggctgactttagcatgtcaccatgcctctaattttccctctgaaaagggacccaattgtccaggcatggtggctcatgcctgtaatgccagcactttgggaggctgagttgggtggatcatttgaggccaggagtttgagaccagcctggccaacattgcaaaaccccgtctctactaaaaatacaaaaattagctgggtttggtggcaggtacctgtaactcagctactcaggaggctgagacaggagaattgcttgaacccagggggtggaggttgtagtgagctgagatcataccatggcactccaacttgggcaacagagtgagactctgtctcaaaaaagaaaagaaaagggacccagtcatggtacttaccctgaaagtttgggtttaacacagaatcggacatccagtaaacatttaatgaacgttagtccctgcagtgagatagatgagtccccaccctgtgttgtacgggggaggacacagtggtgggcgtggcatggagcttatgccaggaggtggggtgaaattaatcaaagcaaagaaatgcacaagtgaaatccgtgtttgtggcccaagttagcagggccctgccccaccccagtggacatctgcagggccctccctgtcctcttccagggcctgtgccctgagggagatacaccccaacccccatcctagccatgccaacctctactaccctctccccagctcatcctgtttgggctcagtaatcagctggctgtgacattccgggaagagaacaccatcgccttccgacacctcttcctgctgggctactcggacggagcggatgacaccttcgcagcctacacgcgggagcagctgtaccaggccatcttccatgctgtggaccaggtgctggtgggcgggcaggtgctggtgggcaggcaggtgcaggtgggcgggcaggtgcagttgggcgggcaggtgctggtgggcgggcaggtgcaggtgggtgggctgcagagagcgggccggactcacaggccctccccttctctgcccacagtacctggcgttgcctgacgtgtcactgggccggtatgcgtatgtccgtggtgggggtgacccttggaccaatggctcagggcttgctctctgccagcggtactaccaccgaggccacgtggacccggccaacgacacatttgacattgatccgatggtggttactggtgagtgggcaggacgaggcttcactgttgggagcctgagctgctgggattaaaatcaacagctgtggctgggcacggtggctcacgcctataataccagcactttgggaggctgaggaggaaggattgcttgaggccagaagtttgagaccagcctgggccacgtaggaagaccttgtctctacgcacaaacaaattagctgggcgtggtggcgtgcccctgtggtcccagctactcaggaggctgaggcaggaggatcgcttgagtccgggaggttgaggctgcagtaagctatgaccacgctgctgcactccaccctgggtgacagagtgagaccctgtctcaaaaaaaaaaaaaaaaaaaaaaaacaagtatgcttagtgtgagtgtgactcttgccacgtagaaagcaccagatgttatattttaatatggctcattcagtaaaacatccgcaggcccagagagtgccaggcctgtaggaatgacccaaccctggggaagcacagggaagaaggccactggggactctggggagaccagcctggcctccccggccccctgaggcccttccctgactccctgtccttagactgcatccaggtggatccccccgagcggccccctccgccccccagcgacgatctcaccctcttggaaagcagctccagttacaagaacctcacgctcaaattccacaagtactgcctgctcactcgaggggggcccagggtgggggaggcagcacactaggcactctcaccccagcaactacttccctaaggtggggacagggcccccccgcccgcgctggtgcctgctgggtgagcacttcccctgccagctgcagagtcagcacgtggcaggggacgctggcacttggggccggaagggacccgaagacgcccctgaccctcacccgagcctcctgcctaggctggtcaatgtcaccatccacttccggctgaagaccattaacctccagagcctcatcaataatgagatcccggactgctataccttcagcgtcctggtgaggccccccgggaacccacagggctcctgagttccagggcagggacctggtcagggagtgtcttgggagcactggccaagggcaagcgtgcgggtgatgagggagggagcccggggtctgtcaggccacctgtcatgtggaccttggggcttggggctgccaaggtttactctgcccccaactggcccccacagatcacgtttgacaacaaagcacacagtgggcggatccccatcagcctggagacccaggcccacatccaggagtgtaagcaccccagtgtcttccagcacggtgagcccctgagccccagaccagcactgaccaggggccctggcctgtcctgggattccccaagccccagatcagcgctgcctgggggccgtgacctccccaggaatccgctgagcctcagatcagcacagaccagggaccccgtcctgtgctgagatcccccaagccccagaccagcactgaccggggttcttgactcaccccaagcaagccctgagcccactgaccaaccaaaaccagccgtgcagccccctaggtctccagcctggcctggcaccaatgctagcctcccaaggctccatgccatccttggccctacccgctctgccctccccgcaggagacaacagcttccggctcctgtttgacgtggtggtcatcctcacctgctccctgtccttcctcctctgcgcccgctcactccttcgaggcttcctgctgcagaacgtgaggcttctgcgtcatgtgtgctggtgtcctccccgcctggccctggggcgataaaagccagggctttgagggtcctgtgcctggtcaggccctcaccccgcctgccttctgcaggagtttgtggggttcatgtggcggcagcggggacgggtcatcagcctgtgggagcggctggaatttgtcaatggctggtacatcctgctcgtcaccagcgatgtgctcaccatctcgggcaccatcatgaagatcggcatcgaggccaaggtgcgtcctgccaacaccctgggccccaggtcccatccctgctgtcagtgcctatccggggccatatcctcccccaggccccccaaaggaagggctgggccagataggttgacgcagctcccacccgcagaacttggcgagctacgacgtctgcagcatcctcctgggcacctcgacgctgctggtgtgggtgggcgtgatccgctacctgaccttcttccacaactacaatgtgagttttgcacatgcagctgggccttccacatggttactccacaccctccaaataaatccctacacacgcagccctcaccagccccggccaatggccccttgcaagcctcctcctcctacctgcccacaccagatatatctgtcactgcacctgcgcggggccccgggagcctgctcctttgtgcccacccagctgagtctagccgtgcgttgccctcggaccccctcagacgtggccacgccccctctaggcacccactggctcccatgaccacaccggctgtgccctcggcaaggccccgcccctcccacccccatctgggtgcccacagctgacctgagttgtggccacaccctcaacgaggctccctctgccccaacccagatcctcatcgccacactgcgggtggccctgcccagcgtcatgcgcttctgctgctgcgtggctgtcatctacctgggctactgcttctgtggctggatcgtgctggggccctatcatgtgaaggtacatctaacccctgatgtccctgacattgaccctgtgaccttgtcattgacactgtgacccccagatgaccccttggtgactgctgggagtctgtccactgtcccctgtggtccttggtgaccctgacactgaccctgtgccattattgttgtcacagttgttgatgaccctatttcgacctgaattactcccctcctgctctatctacccagaccctaggtcggccctgtggccctgtcattgacccgtggtcccggccattcacatgggaccccagcctgggacctggccattcacatagtgaccccagcctgggacccggccattcacgtgggaccccagcctgggtcccggccattcacgtgggaccccagcctgggacccggccattcacaggggccctagcctggaacccgaccattcacatggtgaccgcagcccgggacccggccattcatgtggggccccagccaccagctcctagccatttgcatgggaccccagcctgaccccagcccccggttcctggccatgccttggctccctctgaccccgccgcccctctggcagttccgctcactctccatggtgtctgagtgcctgttctcgctcatcaatggggacgacatgtttgtgacgttcgccgccatgcaggcgcagcagggccgcagcagcctggtgtggctcttctcccagctctacctttactccttcatcagcctcttcatctacatggtgctcagcctcttcatcgcgctcatcaccggcgcctacgacaccatcaaggtcagccgcatgcacccagccctgagctcgggctctgggtgccctggagtctgccatgagggggtcttggggacaccgcagggtgaacagagaagacccaggagagaatatgggagactctatgaaaccaaaaagagggtggttcagaactggggggcgcagggggatgtcaaggtgggcttgggccaggagggggcctgagtcagtctttgccaacagggcaaccgagtcatagagtttatttatttatttgtttatttgagacggagtcttgctctgtcacccagggtggagtgcagtggtgcgatcttgactcactgcaacctccacctcccgggttcaagcaattctgtctcagcctcctgagtagctgggactacaggcacacgccaccacgtccagctaatttttgtatttttagtagagatggcatttcaccgcattggtcaggctggtctcaaactcctggcctcaggagatctactgccttggcctcccaaagtgttgggattacaggcgtgagccaccacgcccggcctattttattttattattaaagtattgttctttattttattagagacaagggtctcactgtgttacccaggctggtttcaaactcctgaggtcaagtgatcctcccactttggcctcccaaagtgctgggattacaggcgtaagccaccacacccagcctattattattattttttttttgaaatggaatcttaccctgtggcccaggctggagtgcaatggcatgatctcggctcactgcaacctccaccttctgagttgaagcgatccttgtgcctcagcctcctgagtagctgggattacttgcacgtgccaccacacctggctaatttttgtatttttactagagatggggtttcaccacgttggccaggctggtctcgaactcctgacctcaggtgatccacctgccttggcctcccaaggtgctgggatttcaggcatgagccactgaacccagctaagtcatacagtttcaatgaccttgtcattgaccctgggacgttgccattaacatggtgatcctcagctggccccattcctatggcggacctctaaaaacccaaccctgaccccagcccccagccatgcccccgactccctctgaccctgcccaaggttagcttctttatttatttattttttttgagacggagtctcgctgtgtcacccaggctggagtgcagtggtgcaatctcggctcactgcaacctctgcctcccgggttcaagcgattctcctgcctcagcctactgagtagctgggattataggcacacgccaccatgcctggctaatttttgtatttttagtagagatggggtttcaccatgttgaccaggctggtctcaaactcctgaccttgtgatccgcccacctcaggctcccaaagtgctgggattacgggcgtgagccactgtgcccggcccaggttagcttctgagcagtaaaactgggctcaacccagggctgtctgattccagaagccgtgctcctaacccctctgtcctcagtttagtagggtggctgggaacagtggtttccctgcaagctgcaagggtcaggggacagagcaggatgcggaagtggcaggtagataggattctttcagcagatatatctaagggccaagatctgtgctgggttctgggcatggaggaaaatcaggtgtgcatgatccgtccaaggcctgtgggcaaggatggcacaggaacagacatcccatgaccaatgacctacttgtaacaggtatgaaggaagagtggaaggttgcagagggacccctgctttagattggtatgacaggagatccaggagagcttctagaatgttctatccatcactagtctctagccctatgcagctatttaaattttgattttaattccggctgggcacggtgactcacgcctgtaatcccagccctttgggaggccgagggggggtgggggtggatcacctgaggttaggagttcgagaccagcctggccaacatggcaaaaccccatctctactaaaaatacaaaaaattagcggacgtggtggcaggcacctgtaatcccagctactccggaggctgaggcagtagaattgcttgaacctgggacgtagaggttgcagtgagccgagatcaagccactgcactccaacgtgggcgagagaccgagactctgcttcaaagacaaaacaacaattttttaaaaattttaattcaaatgaagtacaattgcaaatttagcctctgacttgcaccatcctgtatccagtgctcaaaagccagtgtggctggtggctgccatattggacagcatagatattgaatacttccatcgcctctagactgaagagatgggagcccaggggcagtgcaccgaggggaaggaatagctaaagcaaaggtctagtagcctgaaaaaacttggagaaaagatggcccctccatgaggccgagtgagaggaaggaagccttggctgggaccctgccacatccaatgtcaccggcagatgggtacacccccttttccccatgcatggattcagctgtcccacagacacattgactcaggcccttggaactacttcctgtcttgccttagcacgtagacatcacacacatgcatccactcaggtgggcagtctcaggccctgctcccactgctgtgctcagcgtgcatccagctcactcaatagatggtttctgagcatcgaggtcatgtcagccctggctctaggtctgtaggtgctggacctacagcagaaggcaaagacacagactggcaaagacacagcttgtatccaggttcaggggtcagggaaggtccctctgtgcaagcaaactgtggaacaacgggtggagcaggcccagcaagtgcaaaggcccggaggtgggaagcgatgcagatatggctggaggggagggcggacttcaagggccttggaggttgggagccactttcaggctgagcctcccggcttctctccccagcatcccggcggcgcaggcgcagaggagagcgagctgcaggcctacatcgcacagtgccaggacagccccacctccggcaagttccgccgcgggagcggctcggcctgcagccttctctgctgctgcggaaggttcgagtcccgggtctggcacattcagattggaggttagggaatggggaaaggggagcgagccagagaaaactgacgcccctcttccctgcttccttcctccagggacccctcggaggagcattcgctgctggtgaattgattcgacctgactgccgttggaccgtaggccctggactgcagagacccccgcccccgaccccgcttatttatttgtagggtttgcttttaaggatcggctccctgtcgcgcccgaggagggcctggacctttcgtgtcggacccttgggggcggggagactgggtggggagggtgttgaataaaagggaaaataaatgtgtcgttttcatttttagcgggaggagcagtccttgcgttaagcggtgtgaggccctttaaggcgcggccacactcagcatggcggcctcagtcggccttccaagcatggcgcggggaggaggggtgggagggtcgggagggactgcggtgcgactaggagtgaataatttaaaggggccgtgcctgcggagccgggcggaacgctagcggtgttggcgcggagtggaccccggctgcggcccctgggtgagtctgggtttccgttagcctcgcaggggtgtcccttcgagggtcgttagcgagcctccgctttcccacgatctgtcctccgattcctgttaactctagactttctgatgttcccataccccccacgtctcggcaggtgtttccacaccggtagccagctgtgccctgaggtggaagaggaccggccacccaggaattttccaagtaacgactcggagtctccgggattcctatctcccggcccccgaatttccattaatattctagcgatgtcagaaacatcctcagcttcccagaaaaatcccagtaatattccagcatctctcagtatcttccaaggagcccggacgccctccccaggcccgctctcataagcaccccaggaatgtgcccacccacctcctggttttcccagcagtagtattgtaatcctcagaatctcagtaactttccagtgaccccgcatccccacccactaatcccagcgtctctggttacgcctcccagcaatggcgccaccatcggtcccggagtcccagtgatgctctgtgccatagagcccccataacttcactactacgtgatagtaaatccccggcaaaaaccagcagcgccttgcaagcccacgccaccccaagcatcccaggactcttctgaaacgtgggtatcagacgccttccgcggatgccccggcagtactcccgtgcctcccagctcctgggtcttccccggggcaggcttgcgtcgggagccgagtatctaggtgcccactcccggaccccacggtttgcgggcccgttttcctggggtggggcattcagtcttcgacggagtagggggtgcggcctggggggtggggtggtcaggcttgatcaaccctgcagagggcagtgacccgggaggaagtcaccaggtgcagaggaccgtgccctgtggggacctgcctgcaggctgctgacagtgggtaccaggtcggcctttggccccggggtggggttggacaggcgggcgtctggtaggccctacgcgtaggcgaagggagcaggaagccggggacccgcctcatctcctggccagggccgagaggtcggtttgctccatcccttagtcccgcagcgcccctctagcctcgcccctggcagctggagacgcttcccccgccaccccagagggcagggcttgagctgggggcagggcttgaggcaggggagaggtgggcccagattgacgacttgcacgggttccttcgactccttgatttcccaggactccgggctaccagatcggccgtccagctggaatcaaccgatggaggctccgctgcaaactggaatggtaaggggtggggcggagaccgggtaggtgccggcgtggggcgccaagaggactacaactcccggcgtgctcagcgcgcattacgtggtctggcgataacgcgctgcgtccgctcgggcggaactacgtttcccggcatgcactgcgggccgccgggcctcagggaagagtcgcgcccccggggagggagcagcactggcccattctgcagatggggacatcgagtcacgggctggctacgaactcctcgggggcgaaggtggcggagagggatgggttccaggacgtcctggcgcccggggaaggctcggcgggacggatttgcggtgcgcagccagtgccgttcgtccctcaggtgcttggcgtgatgatcggggccggagtggcggtggtggtcacggccgtgctcatcctcctggtggtgcggaggctgcgagtgccaagtgagcacccgaggggcccctcttgggaggctgtatggtggggggcccaaatgcccgggtcccgaggcggcagagatggggatttgctggcgtctgttcgcggtaccccagctctggcagggtggagtctgcacagagctcggagtgcccctgtccccacctatccccagaaaccccagccccggatggcccccggtatcggttccggaagagggacaaagtgctcttctatggccggaagattatgcggaaggtgagtccgggacccctggggtccgccctgaccacacagaggccgcgccccttccctatttacacttcttagtgtccgccaccgctccttccttgatggagaccccctggatccgtctgcctcttctccaaggtctgaattagcaattcacccatctccgccttcattctcccaggtgtcacaatccacctcctccctcgtggatacctctgtctccgccacctcccggccacgcatgaggaagaaactgaagatgctcaacattgccaagaagtaaggctgtgctgggtgtgacctggtattaggggttatctcaggggccttttgagtaatcagcttacaccaaagtgttgtggaagtcttcccatattggctgcgcgctgtggctcatgcctgtaattcccagcactttgggaggctaaggcgggcagatcacctgagatcaggagtttgaggccagcctggccaacatggcaaacctcatctgtactaaaaatacaaaaattagctgggcgtggtggcatgggcctgtaatcccagctactcagaagggtgagacaggagaatcacttgaatctgggaggtggaggttgcagtgagctgagatcatgccactgcactccagcctgggcaatagagtgagactctgtctcaaaaaaaaaaaaaaaaaaaaaaaaaagaagaagaagaagaagaaagtcttcctgtttcagagagacatctctggactctcctctcagagctcttccacaccagacatgctgtctctagggtatctcttccctgagggctacctcagtgaccttctccttccactggagtatctgagctatttgttcccaagtcaatatctcagaggtcttgccatatacttagtgggggggtctacatcaggggtttccatgtaggttatttcatgagtctcttcacatgagtggttttcttccagggtacctcactgaggtaattgtgtttctacgatctcctaaaggggctatctccagcctccagcctctcttctccgggggttatctcaggcatctctgtacatcagaaggcatctttcctatgttatggaccttgaagttcttcccacactaaggaggctgtctcaggagtttctgttccctaggggctatcttatgaattttcttgcactagaaatataggaaggatgcatcagagatccctgttggcagcaaggtctgcgagaaaggctctccaactctctttgcaagttgggtgctggctctgggatccctgtgcgtcatgtagtctacctggaggtctgcctcaagggtttcttcacaccagggcagggctctccatgatcaatagtcctgcaatggcagtcctttcttttttgtttgtttgtttgtttgtttttgagatggagtcttgctctgtcactaggctagagtgcactggcacgatctcggctcactgcaacctccacctcctcggttcaaaagattctcctgcctcagcctcccgagtagctgggactacaggctcataccaccatgcccagctaatttttgcatttttagtagagacggggtttcaccatgttggccaggatggtctcgatctcttgaccttgtgatccgtccgcctcggcctcctaaagtgctgggattacaggcatgagcgactgagcccggccaatggcagggctttctgtgagttgagtagaaggactatctcaaagttccccatgatcagttgagggtctatacctcaggtttctccacatcacaggagctgtctgtagtgtttgcacactcttaagggactaccctgatatcttcatgattgtcagagggctgtctgagctttctgtgacctagggaagagttagcccaagatctccctgatcaaaaaaggaataatcataacaattataattattattattattttggagacaggatcacactttgttgttgaggctagagtgcagtggcacaatcacagctcactgcagcctttacctcctgggctcaagagatctctcctgcctcagcctcttaagtagctgagaccatgggcatgcaccaccatgcctggctaatttttaaatttttttgtagagatgggagtctcactgtgttgcctgggctagtcttgaactcctggcctcaagcaatcctcccacctcggcctcccaaagtgctggtattacaggcatgagccaccacgcccagccaaaaaaggaattatatctgaatttcttgatttcactgagtttaactcagggtcccatcctccaaggtctatctcagggatcttttgccagcggagggtctttctcagcaatcactgtgacttgtggggaagggctctcccaggtccacgattagcagaggggctatctggattctccacttataatgagggctacttcagggacctctgtggctgtcagaggggctgtctcaaggttctctgagactgggaggaaggtctatctcaggaatgtttatgtagaacagagagactgtatctgcggtcttctcatatattggaagctatgtcaaaggcatactcacgttaaggggactatctcaggaatctactctgtgactactggaaggaccgtttcaggacccccatgataaacacaggtaccatttctgggcctacccttatcttggaagctatgtcaggggtctgccttcctaaagggttcagctcaggggcctatgcctagtggaggggccatctcagagaactttaggtctggggtcatagggtttttccataaagggccagatagtaaatgtttcaggctttgctggccacatatggtccccattgcaactcttcaactctgctgcatgggagcagccataatgatatgcaaatacatgaatgtggctttgtaccaataaaactttatttaccaaaataaatgtggccagccgggtgcagtggctcacgcctgtaatcctagcactttgggaggctgaggcgggaggatcacttgagttcaggagtttgagaccagcctggccaacatggggaaacctcatctctactaaaaatacaaaaaattagctgggcgtggtggcacccacctgtagtcccagctacttgggaggccgaggcaggagaatcgctttagcctgggaggtggaggttgcagtgggccgagatttcgccactgcactccagcctgggtaaaagagcgagactcctgaggcagggcacagtggctcacacctttaatcccagcctttgggaggccgagtcgggcggatcacctgaggtcaggagttcgagaccagcctgcccaacatggagaaaccccatctctactaaaaatgcaaaattagctgggcgtggtggcacatgcctgtaatcccagctactagggaggctgaggcaggagaatcgcttgaaccctggaggtggaggttgcagtgagccgagatcgcaccattgcactccagcctgggaaacaagagcaaaacttcgtctcaaaaaaaaaaaaaaaaaaaaaaaggtggccagcctgatttggccagcgggccagagtttgctgtacatgagccctggggaaaggggtatgcgggggtcttaggtttgcctgagccttctccgtgcccccctcacccccggcacccctcccctcccaccaggatcctgcgcatccagaaagagacgcccacgctgcagcggaaggagcccccgcccgcagtgctagaagctgacctgaccgagggcgacctggctaactcccatctgccctctgaagtgctttatatgctcaagaacgtccggtcagtgttggggtgcaggtgggggtggagggctgcagacgtggggccgccctgacctccagcctctgtcgcccaccgcctgtccaacagggtgctgggccacttcgagaagccactcttcctggagctctgccgccacatggtcttccagcggctgggccagggtgactacgtcttccggccgggccagccagatgccagcatctacgtggtgcaggacgggctgctggagctctgtctgccagggcctgtgagtgggcctccccaggggctgctgcaggaggatgggtggtggggatgggcagcaggcattggtctgtagagctggtggtctttggagatgcgtcatcgggagtcaggggaacgggtgaccgaggacatttggggtagtctgcgtagttgctcagtagttacaagtattgaacgatgggagatgcctgctcgttggaagggttggtgggttcccctgagaagggatgagaagtgtcagtgatcattgggatggatgagggggcgacatgccagtcaccagggcgaggccactgagggtccacggtctcctgtgtctcaggacgggaaggagtgtgtggtgaaggaagtggttcctggggacagcgtcaacagccttctcagcatcctggatgtcatcaccgtgagtgaccagtttctgaggcaggggggctggggtgcaaggtcccacccaagggactaggttgaaggaaatcacagggtccccaatctctggttcatccgttatgctgccgatggcccctcacgggactggcgccaggaaggattaggggagtagcgagggggactcgcagcctctgcccttgtctctcttcacgccctcccctcccccagggtcaccagcatccccagcggaccgtgtctgcccgggcggcccgggactccacggtgctgcgcctgccggtggaagcattctccgcggtcttcaccaagtacccggagagcttggtgcgggtcgtgcaggtcagtgggccttcgcctcctgtcaccccctgagggaccccaccctggcccccacccattccaggctccaagggaccgaggcccagcagccagcaggcgctggagctgtggttatcggcctggagcagccagatgtctgcagccgcggactcctcccttagctgcctcgccccatttccccagactgtgggtctctccctggttcccgcccgaccccttatgctgcgaactagcccggcccaccatctggccctgccccttaccccgccccatcttatggccacgcccctcgagccctgcagatcatcatggtgcggctgcagcgagtcaccttcctggcactgcacaactacctgggtctgaccaatgagctcttcagccacgtgagtgggtggcggggagcgagcacaggggggatgggggcgaggtctccctcccaggacaggccacaagctgttctctgcccccaggagatccagcccctgcgtctgttccccagccccggcctcccaactcgcaccagccctgtgcggggctccaagagaatggtcagcacctcagctacagacgagcccagggagaccccagggcggccacccgatcccaccggggccccgctgcctggacctacaggtacccagggacccgaggccagccgagcccaatctcccaggaagccccgtctcagccgccagcccctttttcagttctgcatagagtcaacctgaccttgtccagccccacagggactccatagcggggtacccaggtctgactcctatctggtaccgaggaagctgtggcctcgtccccaagggcccattggaattgctttaactagttaatcagtcgccagcatctccttatctcccaacctgctaatcctcctagtggctctgaggggcaggagcctgaacatgtgtctcccccaggggaccctgtgaagcccacatccctggaaaccccctcggcccctctgctgagccgctgcgtctccatgccaggggacatctcaggtttggagcactgggtctgcggggagggccatggagcttccaggtttgaatccaggtccaccgcctgcctgtcttgattgttttaatctgcgaaatgggaacactgccagtacttccccaggcactgttttgtagatattcattgagatagtgcttctcccacctgttaagagggattcagagggagagtgcaggcgttgattagtcatgtctgctacagcagtggcccatggcacattggtatccattggtctcagactgcaactgtggttactctcatctttttcttttcttttgagacctgtctcccaggctagagtgcagtggtgctgtcatagctcactgcagcctcgaactcctatgctcaagtgatcctccagccccagcctcccaaatagctggaactacaggcctgcaccactacacctggctcattttttaaaaatcttactctcatctttatggtttttgttgcccccctgcctgcctgcaggcttgcagggtggcccccgctccgacttcgacatggcctatgagcgtggccggatctccgtgtccctgcaggaagaggcctccggggggtccctggcagcccccgctcgggtaaggcttgggaccctgcccggtggtggagcccgcaggggaaggtggctgggagggagcatcaggaggtcacaagcctgccccactcagacccccactcaggagcctcgtgagcagccggcaggcgcctgtgaatacagctactgtgaggatgagtcggccactggtggctgccctttcgggccctaccagggccgccagaccagcagcatcttcgaggcagcaaagcaggagctggccaagctgatgcggattgaggtgggcagccgaggggagctgggcacagggcgcaagggaggcctggctgcgcccatctcaacccccctacctccccaggacccctccctcctgaacagcagagtcttgctgcaccacgccaaagctggcaccatcattgcccgccagggagaccaggtgaggctgacccctgacctgtaaccatgccacctgagatcattccctatgacttctgtgacctctgatccctgccctttgactgtaagaccagcaccttctcccatagaagcagacctctctcatcctatcatttccaacctctaacccttgggtcctgtgacccccaccccctaaccccaccctatgtcctctggacctgtcaacccttcacctgtgacccctgaaccttttgccctaggactccaactcctagatctctcctgcctgccctggctcttcctgtaattctgttttctgaacttctgatcctgcagtattcactaacatgtctgcttctcatgctgaccgctgccaggataggggctcaataaatggctacaaatcgccatctggcctcggaaggccatgaaccagccctgggtcggggtttcagggccttgtggcggcacccaggatgtgtaggaaaatgtatcctaccattctgtccactgtccatatggggaaactgaggcccatcaagggttagtgacccgactaccagctgaaagtcaggaagcctcagggtaggaggaggaggaggaagaagaagaggaaagttgaaacccacactctgtccccagagtgtggcagatgatctagaaagttctctgcttcctcatcagtggaatgaggtaataaagaagagatgcctagttcgcagaaccccagtaagacttcttttttttctttttttttttttttgagacggagtctcgctctgtcacccaggctggagtgctgcagtggcgtgacggtggctcactgcaagctccgcctcccgggttcacgccattctcctgcctcagcctcccgagtagctgggactacaggcgcctgccaccatgcccggctaattttttgtatttttactagagagggggtttcactgtgttagccagggtggtctcgatctcctgacctcgtgatccgcccgcctaggccttccaaagtgctgggattacaggcgtgagccactgcgcccggcctttttttttttgttttgagacagagtcttgctgttgtcacccaggctggagtgcagtggcacaatctcagctcactgcaacctccgcctcctgggttcaagcaattctcctgcctcagcctcccgagtagctgggattacagggttgtgccaccacgcctggctactttttatatttttagtagagatggggttttgccatgttggccagccttgtctcaaactcctgacctcaggtgatccgcctgcctcggcctcccaaagagctgggattacaggcatgaaccactgtgcccagcctactgagacatttttgattgttaggatttcacagggtgctgttcctgacacctgatgggtagagatcagggatgctcaaatgtacagagcagcaggccggaaccatacagtccattatccacagtgtggggtttgcaagagtgacaagtggtcagggagggtgtttagcagcagcttatagggagcgggggcttgaggtgacagtgagctgtcataggcactgggaccccagctctgccccaggcttgggggagagaagcctggggcagggttggggtggggtgggagctgtggtcccactgttagccggctggagtgttgctgtgtcacttgacccagtgactctgctgtccccttgaaccacccatggcagggatgggctcttttctggagaggaagtcaaggcttttgccagctgttcttagaatagctgaggaagtaaggttaccctgtggcttctttgggggcccctgggccctgcttatctgggagactgctggccacaacccagccctggcctgtcagtgtaccacgctggtctgcagcccctcagagcttctctgcgttggcaggacttttgttagggaccctgtgctctcctgtgcttctccttgaaactttttttttttttcggagacggagtcttgctctgtcgcccaggctggagcgcagcggtgcgatcttggctcactgcaacctctgcctcccggattcaagtgattctcccacctcagcctccctcgaagctgggactacagtcacgtgccaccacgcctggctaatttttgtagttgcactagagatggggtttcaccatgtcggccaggctggtctcaaactcctggcctcaagtgatccactcgcctcagcctcccaaagtgctgggattacaggcgtgatcctcggcacctggccacagtctggaaattctgtcttagaaggttccagcatgtgtttatatctcctgggactgtgcctcacccaggggtccctgcagtgttttggcaggtggagcttcactgggtaccagacaggttggtgtggtggataaagaaggaatctctccatttctgggcggtttcagttccttatttataaagggatggaacaggaaggtttctagctggtcaggctacccaaagaagaaagaaacgtgtttacccagcatttgccccatctcgaactgtgtgctgctggctggacaagaggcaggaaaatggctgggcacggtggctcacgcctgtaatcccagcaccttgggaggccgaggtgagaggatcacttgaggtcaggagttcgagaccatcctggccaacatggtgaaaccccatttctactaaaaattcaaaaattagtcaggcacgatggcgggcgcctctagtcccagctactcgggagcctgaggcaggagaatcacttgaacccaggagacaggttgcagtgagctgagatcgcacccctgcactccagcctgtgcaacagagtgagaccctgtctcaaaaaaaaaaaaaaaaaaaaagtgggcagggaaaacccttagtggtccctgcccttgggcagcccaccgtattctgagagacatgactcaaaggattacacaaattcttgtaaaatcataagtgcttagtgtcacaaaggaaatgatcttggcactacaaagtctggcttagacagggtggcacctctaagggcatgacctaagaaggaaggagggggaggaacaaactgggtgcaggtgggaggaaaggtcattctaggcagaaggaagagcttgtgcaaatgttgtgtggtgggaagaaataggttgatctctaagaaataaaaaaggaagtcagtgggcctcaagtgaaacaatattttttgggggggtgtaatggttttattgagctataattcatgtactatacaatttacccatttaaagtatatactttaggctgggcacagtggctcacgcctgtaatcccagcactttggaaggccgcggcgggaggatctcttgagtccaggagttcgagaccagcctgggcatcatggcaaaacccagtctctacaaaaaacaaacaaaaaaaattagccaggcatggtggcgcatgcctgtagtcccagctacacgggaagctgaggcaggcataagccactgcacctggccatgcccacctaatttttgtatttgtagtagagacagggtttcgccatgttggccaggatggtcttgaactcctgacctgaggtgatccgcctgcctcaccctcctaaagtgctggaattacaggcatgagccactgcacccggccttatgtaagggcttctgtgtagacatatattttatttatttttttaaaggtggggtctcactatgtttcccaggctggtcttaaactcctgggctcaagtgatcctcccaccttggcctcccaaagtgcttggacatatgttttcatttctcttgggtatatacctaggagttgaattgctgggttataagccaattcaattttttttttttttaagagggagtctcgctatgtcgcccaggctggagtgcagtggcgcgatctcagctcactgcaacctctgcctcctaggttcaagcagttctcctgtctcagcctcctgagtagctgggattacaggcacacgctgccacgcccagctaatttttgtatttttagtagaaacacggtttcaccatattggtcaggctggtcttgaactcctgacctcaagtgatccatccacctcagcttcccaaagtgctgggattacagatgtgagccaccatggccagcctctatttttaatttttttaagcactgtgtgtttgtttgtttctttgctagactgttttccaaagcagcggcaccattttacatttccactgacagtgtatgtgaattccagtctctctacattctctctaaccctttgtaattctagccatctttgtgggtgtgaagtgtagtatgtcattgtggttttgctttgcatttctctaatgacttgacgttgaacagctttttatgtgcctattggccatttgtatatcttctttggagaagtttttattcagatcttttgcccattttactcttactttttttagagacgggggtctcactatgttgcccaggctggtctccaactcctgggctgaaactatcaagcgatccttctgccttggcctcccaaaatgctgggattgcaggcgtgagccaccgcacttggcctttaatttattttagagacggggtcttgcactgtagcctaggctggagtgtagtgacgctatcatagctcactgcaacctcaaacatctaggctcaagcaatcctcctgcctcagcctccagagtagccaggactatagacacatgctaccatgcctggctaattaaaaattttttttttttttttttttttttttttttttgtagagacagggtttcactatgttgcccaggctggtcttgaactcctgggctcaagcgatcttcacacctaggcctctcaaagttctgggattacagttgtgggccaccacacccagccccttcagtatactttaaatcaggggtgtccaatcttttggcttccctgggccacattggaagaattgtcttggaccacacataaaatacactaacagttatagctgggcatagtggcacacacctgtaatcccagcactttgagaggccaaggcggttggatcactgaggtcaggagttcaagaccagcctggccaacatggtgaaaccccgtctctactaaaaatacaaaaattagccaggcgtgtggcaggcacctttaatctcagctacttgggaggctgaggcaggagaatcacttgaactctggaggcagaggttgcagtgagccgagtttgtatcactgcactccagcctgggcaacagagcaagacaccgtctcaaaaccaacaaaccaaaaaaccccactaaagatagctgatgagctaaaagaaaaaaaatcgcaaaaaaaaaaaaaaaatctcataatgttttaacaaagtttatgaatttgtgttgggccaaattcgaagccatcctgggccacgtgcagcccgtgggcagcagggtggacaagcttgctttaaatcatctcgagattacttataatacctaatacaatgtaaatgctatgtaaatagtcattatactgtattatttagggaaaaacggggaaaatagtctgtaaatggtctgcgcaggtgcaatttttttttcctgaatattttagatccaaggttggttgaatcctgggtatatggaacatatatatatatatacacacacatatatatacacacatatatatatagagagagagatgctgctcatctatatataatctatgtaaaaaaatttttctttttttttttttttttttgagacggagtctcgctcagtcgcccaggctggagtgcagtggcgcgatctcggctcactgcaagctcctcctcccgggttcacgccattttcctgcctcagactcccaagtagctgggactacaggcgcccgccaccacgcctggctaattttttgtacttttagtagagacgtggtttcaccgtgttagccaggatggtctcgatctcctgacctcgtgatccgcctgcctcaggcctcccaaagtgttgggattacaggcatgagccatcgcgcccggctaaaaaatatttttatatttatttatatttatatatagatggtgcttatatccaaagtctttattctctccttcatgtttcttttttttctttttttttttttgagacggagtctcgctctgtcgcccacgctggagtgcagtggcgcgatcttggctcattgcaagctccgcctcccggtttcacgccattctcctgcctcagcctcccaagtagctgggactacaggcgcccgccaccacacccggctaattttttgtattttcagtagagacggggtttcactgtattagccaggatggtctcgatctcctgacctcttgatccgcctgcctcggcctcccaaagttctgggattacaggcgtgagccaccgcgcctggccttcttcttctttttttttttaaagacagtgtctcactctgtcgcccaggctggagtgcaatggcatgatctcagctcactgcaacctcagccttccaggttcaggcaattctcttgcctcagcttcctgagtagctggaattacagacatgtgccacgacgcccagctaatttttttattttagtagagacaggtttcgccacgttggccaggctggtgccgaactcctggcctcaagtgatcccccctgcctggcctcccaaagcgctgggattacagccgtgagccaccgcgccctgcgccttcatatttttcttaacccttcctttcttctttaattttttcctgtgggggcatgttgacctgagctggggtccacgctgtccgggttctgtgttcatcacatcccctgcccgcacaggacgtgagcctgcacttcgtgctctggggctgcctgcacgtgtaccagcgcatgatcgacaaggcggaggacgtgtgcctgttcgtagcgcagcccggggaactggtggggcagctggcggtgctcactggcgaacctctcatcttcacactgcgagcccaacgcgactgcaccttcctgcggatctccaagtccgacttctatgagtatgacagcccgaagttggagtgtgggtggcactcggaggaccccaacccgtgggagtggccagaaccccatccctcaacctcactcctggaagagcagaagggagcccccagatctggcctcccagcgccggtgtaggacggttttgaggccttcctctttcatcccaagtctgttcctgcaggatcatgcgcgcacagcccagtgtggtgctgagtgcggcgcacacggtggcagccaggatgtcgcccttcgtgcgccagatggacttcgccatcgactggactgcagtggaggcgggacgcgcgctgtacaggtgcagctcccaccgcgctgctcaggcccggcctaggggtggggacctgggggtggtcagaccttgctgacctccacgcccactcaggcagggcgaccgctccgactgcacttacatcgtgctcaatgggcggctgcgtagcgtgatccagcgaggcagtggcaagaaggagctggtgggcgagtacggccgcggcgacctcatcggcgtggtgagcgcgacccccacccactgacctctggccttttccaggccagtccctcgacaactcacacacatcatcccgggtaatccagggagtggtgaatgcagctcccgacctctgaggtcacccagtccactccccgcccagacctcatttcgttggaaaaaggggattccgcctgtcgtggatccctgtcctctccctctccccagagctctaatgggtagcgagcgaggcttgcttccctacacccccattgcaggggagccctagatggggcagtacagccccctttccacccatcttcggcctcctcattccccacccaagcagccccaatcatgcacgcggccccccaggtggaggcactgacccggcagccgcgagccacgacggtgcacgcggtgcgcgacacggagctggccaagcttcccgagggcaccttgggtcacatcaaacgccggtacccgcaggtgcggcctgttgtgggcggggcagagaggcggaggcgggactccgggggggtgggggccgggcctagtgtgtgggcggggcttacagaggggcggggtcgagggaggggccgaagcgagagagtgagggcgggggctctcgggggtgggacccaggtaacgggcacccaggagccccggcataggagggagaggtgggacctggacagccgcttcccaggtctcactgaaatgccggcctccaacgcccccaggtcgtgacccgccttatccacctactgagccagaaaattctagggaatttgcagcagctgcaaggacccttcccaggtgagagccggccggcccagagcgtgctgggagatgtagtccggcgtccagagcatgctgggagggaagccttctttcctgagggatgctgggaaatggagttccgcgaagaaatcgtgcccctgagggtttcaaaccctaagtaggacccaggtgcagagcattctggggaatggagttcgtgttcctgagcatgctgggaaacgaagtcctcgacccctggcgtgctagttaatgggctcgaaagtaaatcagtggtgccggggagggagtcttaggcggtggacttggcgtagtctgcccgggagtcagggcttgctggggaagtccacggcctggacgttgagagaaagggagtcctagatcagaatatgatggcagggccgtcatggtggctcatgcctgtaatctcagcactttgggaggctgaggcaggaggatcgcttgagcccaggagattgagtttgaaaccagcctgggcaacatagtaggacccccgtctctacaaaaatttcaaacattagctgggcttggtgacacatgcctgtagtctcagccactcaggaggctgaggcgggaggattgattgcttgagcccggaggtcgaggctgcagtgagccgtgatcgtgccactgtactccagccgggatgacagagctagaacctgtttcagaaaaaataaaacagcaaacaaacaaaactccccataccatgatggaaaatagtctgtggattgttgtttaggactctgggcacctcgccttctgaagttacagcttgctgggagatgtagccccctgtttcagcctgtggcttcagtgagctagaacagaatggggcgtgcggtggggttggaggcctgctgaaatgagggcctgagtttctacattgtggtggccagattctgggccagcccagcaacctagataccccttttccctccaggggttctacccaattggccctgagccctagatcccccaaggcgggggcagggcggtagtggcagaaaagacatcattaagaaattacagaggcctggggcggtgggtcacgcctgtaatctcagcactttgtgaggctgaggcaggtgaatcacttgaggtcaggggttcgagaccagcctggccaacgtggtgaaactcatctctactaaaagtacaaaaattagtcgggtgtggtggtgggtgcctgtaatcccagctacttggacggctgaggcaggagaatcgcttgaaccggggaggcagaggttgcagtgagccgagcctacgccattgcactccagcctgggcaaccagagcaaaactccatctcaaaaaaaaaaaaagaaagaaaaaaaaaaagaaaagaaaaggaaagaaattacagatagagaatacaatatctagaagacaaaagagggtcatcttgccgtgtggctgaaagagggagggaggaagggagggagaaagaggcttttctaaggacagtgagctgagacttgacaactaagatggggccagacatgaaagagaaaccaggggtgctgcacaggaggctggtggttttgaagcactgaggaggaaagcgatcaaggggagaggtgatgggggttggggggtaagtcacataggggctaggggctgtggacaggcacttgagcttatttagattgttattgttagattggggaggaaggattccaccagtaaggaggcaacaagaggtctaggcaagatatgggagttgacagctggtctaggctgttagtggagaaactgggaagcaacagctgggtcaaaagtagcttttcttttcttgtctttgtcttttcttttattttctttttaagacagggtctcgctctgtagcccaggctggagtgcagtggcacgatctcggctcactgcaacctctgcctcccaggttcaagtgattctcctgcctcagcctcccaagtagctgggattacaggtgtatgccaccatgcctggctaattgttgtgtatttttagtagagcagtgtttctccatgttggctaggctaaaaatagctttatttctgcctcgttttatgttcaggtcccccattagacagaggaaccaaggccagaatgaggcaggggcactggccaattgatctcccaagcacagtgaatctgaatggttgtagagttgtgtaatggatcccactgaggtgatcagggcccaaagtggagggtagatggccaggttttaacaaaagagggaatagtagttgaggctgagggtccaggaccagagccatggctttctgtatggtagagtcaagactttgggcaactgggggctgcagtctgggagcacaggagcaagaatttcagataaggaggaagaggaagaagaggaggaggagggttcatctctctggacacaggttcgcaccacaaatctcatccattgggttcttagcaggctctgggttgggtgtgcccccacactcggaactcaccaacccagccagcaacctggcaactgtggcaatcctgcctgtgtgtgctgaggtccccatggtggccttcacgctggagctgcagcacgccctgcaggccatcggtcagtggggtgagggtcatgggtgggggctggcggtgggtgggacattagtgagtgagagatgttagggtaggtcatttggggggtggaggggaacagggccacaggggcggggtaatgggtattcttttctgagttaggccccagccctgtggaccatggttcccagcctcccttccccacctacccctaggtccgacgctactccttaacagtgacatcatccgggcacgcctgggggcctccgcactggataggtgtgtgttgcagaagggagtggggagggtggtgggtgggcctggagcctcaaattctttcagacctgagttcaagttcttggcttccaaccacggagcctgcgtcttacccataggtcaatggggagattcgcagtggtgtgaatctgcccaccggagcacggacttccgtggtgggggtttgggtgtctaagttcctcccagcaacggagctatgtggtctcggggagcacactgaccccaggccaaccccaggatgacgctgcccccttcccaccctagcatccaagagttccggctgtcagggtggctggcccagcaggaggatgcacaccgtatcgtactctaccagacggacgcctcgctgacgccctggaccgtgcgctgcctgcgacaggccgactgcatcctcattgtgggcctgggggaccaggagcctaccctcggccaggtcggaagcccgtgccccctgatctcacccacctcgggtcccgtcctttgccctcccgtgcctgcaccaggccacgtgcaccctcgccatgggggtaggcgatcagggacccaggtgtggccaggtggtggtggggcggctggtgacctcagccgtccgtattccgcagctggagcagatgctggagaacacggctgtgcgcgcccttaagcagctagtcctgctccaccgagaggagggcgcgggccccacgcgcaccgtggagtggctaaatatgcgcagctggtgctcggggcacctgcacctgcgctgtccgcgccgcctcttttcgcgccgcagccctgccaagctggtgaggagcgggccggcccccaccttctaggggcgtggctggtgggcgaggcttgggagactggggcggggcctgggagggctgaggacaggctcgaaggtcagggtacccctgggggatccgccggaccccgccctcatgctcctgggtcgcgactatctcccccatcccagcatgagctctacgagaaggttttctccaggcgcgcggaccggcacagcgacttctcccgcttggcgagggtgctcacggggaacaccattgcccttgtgctaggcgggggcggggccaggtgagggcggggcttgctctctgggggcggggcctggatgtccgagggtggagcttcctgggagaaaccgtgggggcggggcctgggtgttcgagggtggagcttcccctccgggagagaccccgtgggtaggggcgggtcctttgttccttagcagtgcgggaggtgggaggaggtaggggcaggggagttcctgcaggtggggcctagcgggtcactggggcccattttcccggcaggggctgctcgcacatcggagtactaaaggcattagaggaggcgggggtccccgtggacctggtgggcggcacgtccattggctctttcatcggagcgttgtacgcggaggagcgcagcgccagccgcacgaagcagcgggcccgggagtgggccaaggtgtgtgttgcgaggagggattgctgcaccccaggagtgccataaaacccgtggttccaacctaacctgatcccatgggggagcctccggggtcagggtgacccttcctgattaaatctatgatccccagctgtccggacttttatagataagcttctaggactctgggtaaccactttgggacctcctgtctactgaccctaacccataacccccaacgagagcacccagggcccttggtgaccaccttgtggatggccttggatgaccacatcatccctaagtgttcctttttttttttttttttttttttttttgagactgagtcttgctctgtcgcccaggctggagtgcagtggcacaatctcggctcactgcaacctccacctcccaggttcaagtgatttatccgcctcagcctcatgagtagctgggattacaggcacgccccaccagcccggcaaatttttttgtattttagtagagatggggtttcaccatgttggctaggctgcttttgaactcctggcctcaagtgatctgcccgccttggcctccaaagtgctgggattaccagtgtgagccgctgcacctggcccctaagtgctgcttgctcaccccctattgatgaaccttatctgtgaccccatgtaactcctatttgaccctgtctggccccttgtccctagagcatgacttcggtgctggaacctgtgttggacctcacgtacccagtcacctccatgttcactgggtctgcctttaaccgcagcatccatcgggtcttccaggataagcagattgaggtaggcccacctcatcccctgccctgcctacccctccccggaggagccccctgctcctcccccacctcgatccctgtccccgcaggacctgtggctgccttacttcaacgtgaccacagatatcaccgcctcagccatgcgagtccacaaagatggtgggtgtccccgcccagcctgcagcaaccgctgacgccacgtggggttggggggatgcttccgggagggccgctgagcttctgggacgttgttaacacgagtgaccgtccaccctggcccgatcaccgaccactaaccgccacccactaatgccccggagaccccaggtacgtccgtccttgggggaggggagcagggagactcgtcggacgccttacccccctcacgccatccccgcaggctgtgtgtggcgttacgtccgggccagcgcctcctactgcccctacctgcccccactgtgcgaccccaaggacgggcacctgctggtggacgggtgctacgttaacaacgtcccaggtcagcgagcccatcgggccggctgggcctccggcgtgtctgagcgtgtctgtgcgtgtttgtgtctgtgtgtcccaccgcgcaggctccctgtggcggtacgtgcgcgccagcatgacgctgtcgggctacctgcccccgctgtgcgaccccaaggacgggcacctactcatggatggcggctacatcaacaatctgccaggcaagtggccgcccgcaccacccgcacacgcaagcacctcccgcaccacacacacgcacacgcgtgggcacacacagacaggctcgatgacgggacacatgcccaagctgcccatgcaggggtgcagacacacatgcgcacacatacgatcacttgcacaaaatgatacatgaatgtgcctgtggacagcgacatgtgcagttgagatctacattctggccaggcgcggtggctcagcctggaatcccagcactttgggaggcctgaggtgggtggatcacctgaggtcaggagtttgagacccgcctggccaacatggtgaaaccccgtctctactaaaaatacaaaaaattaaccaggctggtggggtgtgcctgtaatcccagctactcaggaggctgaggcagataaatcacttgaacctgggagttggaggttgcagtgagctgagatcatgctactgcactccagcctgggcgacagagcaagactcagtctcaaaaaaaaaaaaaaagaaagaaagaaatctacatctacctgctggcgtgctgtgttaagcacaagtggatgtacgtacaagagggacaggtgcacacgtccacacacacatcaggggacatgcaggtggaatgcaacactcgtgtgcacaccagctatatatgcacatgctttctctcaggggcaggtagggcttacacacacgtgtacacacaggcacatgtgcacagatgaacacgtgtgtcagtgaaatagggcatttgccaacgcatgccagtctgtcccgtttgtcctgcacgttccctcaaacacgcagggatgtgcacacacgtagataggatgcggcacctctgaccgagttaagtcatgcctaccacctttatgggtgcaggtgagaagcgggcaggtacacaacttaaaatctcacaccccagaagtgtgcatatatgaacagacatgtacgccaactgcacacatgctcacaatcttgtaggccaggggtgggcaaactatggcccacaggctgagtcctgccctctgtttgattgtataaataaagctttattgagctgggcacagtggctcatgcctgtaatcccagcactttgggaggctgaggcgggtggatcacttgaggtcaggaattcgaggccagcctggccaacatggtgaaacccggtttctactaaaaatacaaaaattagctgggcgtggtggtgtatgcctctaatcccagctacttgagaggctgaggcaagagagttgcttgaacccgggaggtggaggttgcatcgagcccagatcgtgccattgcactccagcctgggcgacagagtgagactctgtctcagaaaataaaacaaaacctcccaacacctgacccccctcctcaacttcagttgcatcatttgcacgtctgtgcatgacagcatggtgtttgcatgtgtgggtattctctcttttttttttgcgtgatcatttgcatgatggcatctgtgggactgggttgaacatctctgccccgggcccccgaggggagcagcccgctgacccccctggccccacagcggacatcgcccgcagcatgggtgccaaaacggtcatcgccattgacgtggggagccaggatgagacggacctcagcacctacggggacagcctgtccggctggtggctgctgtggaagcggctgaatccctgggctgacaaggtaaaggttccagacatggctgaaatccagtcccgcctggcctacgtgtcctgtgtgcggcagctagaggttgtcaagtccagctcctactgcgagtacctgcgcccgcccatcgactgcttcaagaccatggactttgggaagttcgaccagatctatgtgagtgggcaggagtggcatggtgcctgcataggtggtccggctaagctttgctacttaaagcccagagtggtatgagggggaggaatccaggaggaatccaggaatcccatctggaatctctggaaaacagatcagtgatcaattggtgatgtctgcaggggatgtagtaggggtgtggctgtgcatgtgctgtgtaagaactttctccttataggccagctgcacccctggaagcactgtatagtgatttctactgccatttctgcattggtgggaatgagaatagtgatgaagcagaaatgtctgccacagttccaggagagggaggtagcagtgcgtgtgttatgtgctactgaccctgaaaaatgtgccatagcccaagccaattgaaattgatcagggggccaggcatggtggctcatgcttgtaatcccagcaccttgggaagctgaggtgggaggattgcttgaaaccaggagttcaagaccagcctgtgcaacatagcaaaaccccatctctacaaagattaaaaataaaaaattagctgggtgtggttgtgcatgcctgtcaccccagctacttagggggctgaggtgggaggaccgctcgagcccaggagtttgaagctgcagtgagctatgattgcgtcactgcactccagcctgggtgacagagcaaaactctgtctctaagaaaaagaaagggccaggcatggtggctcatgcatttaatcccagcattttgggaggccgaggtgggcagatcacttgaagtcaggagttcaagaccagcctggtcaacatggtgaaacctcatctctactaaatatacaaaaattagctgggtgtggtggcacatgcctatagtcccagctacttgagaggctgcagcaggagaaatcgcttgaacctaggaggcagtggttgcagtgagccaagattgtgccactgcactccagcctgggtgacagagtgagactctgtctcaaaaaataatattaattttaaaaattaaagataaaaataataaaaatttttttaaaaagaaagaaattgatcagtagctgcagcccagaagccctgagtctgagaagagatgtgtgatgtcccttgtgggctcactgggatagcatgccatgagaaattcaagatgtttgctgtgggcttggggatggcgacatccacagatgtactgcctgtttgcagacttcaaaataagctcacacatcaccaccttgtgttatttgctacccagcaccctgcatggggctgtgtgggaaagaacatggagagattgattggtaatgtctgtcaagggcaggacaggggatgtgtaggcgagtgtgctatgtgcagctgactctgaaataggtttagtctcaaatgcaactcccccagagaatcaggcttttgaggggccagagaatgggcagacagagtggggacaagcaaagcagggttgcagacatggacccagcccctcatttcccacaggatgtgggctaccagtacgggaaggcggtgtttggaggctggagccgtggcaacgtcattgagaaaatgctcacagaccggcggtctacagaccttaatgagagccgccgtgcagacgtaagcctgtgatgcccccagggccactctgactccactgattacagaacccaagcccccttaaagtctccccgaaacctcagatgaccccacatgtccctgggttttgctgagctctcagacctctgctgacttcagagagttcccaccctaggatctcctctgagcccccaatgcaccactgggccccccaggggccccaagactctgtgggccccccctaagagcctcaccagtgtcaccccacaggtgcttgccttcccaagctctggcttcactgacttggcagagattgtgtcccggattgagccccccacgagctatgtctctgatggctgtgctgacggtgaggggcccaggggaccccccaagagggaggggagtggctggagatggcaggccagccccaatcccctcacctgtgccctgctccccgattccaggagaggagtcagattgtctgacagagtatgaggaggacgccggacccgactgctcgagggatgaaggggggtcccccgagggcgcaagccccagcactgcctccgagatggtgagagtgggtggcccagggtcccctcacatcccccagagggtcatgagtacagtgtcaggcaggggagccgggggcgtatttgagatcctgtgtgtgctgggtgctggctgacatgtgacgcatcagtgtcccgtgctgggtgacgtgtgtgtgaccttccctcgcaggaggaggagaagtcgattctccggcaacgacgctgtctgccccaggagccgcccggctcagccacagatgcctgaggacctcgacaggggtcaccccctccctcccacccctggactgggctgggggtggccccgtgggggtagctcactccccctcctgctgctatgcctgtgacccccgcggcccacacactggactgacctgccctgagcggggatgcagtgttgcactgatgacttgaccagcccctcccccaataaactcgcctcttggaaatggcttcctgtcgttttcggactggggacccaccttctgtgctcaggatggctggggctggggtctgacaccacctggtgcttgccccccacagggaatgcctttctagaatccacacggagccccactaggtgcttgtccccactctgccccttctctggctcctcagaagccagtgctgactccggaccacagggccagacattccgtgccaccctcccgggctcacaggtgctcttgggggcccgatatggcacccctcaatttctttctgtgtgttttttgttttttgtgtttttttttttgagatggagtctcactctgtcacccaggctggaggctggagtgcagtggcatgatctctgctcactgcgacctccatctcccgggttcaagcgattctcctgcctcagcctcctgagtagctgggattacaggcgcccgccaccacacccagctaaattttgtgggggggttttttggttttgttttgttttttgttttaatttttgagacagtgtctctctctgtcacctaggctggagtgcagtgatgcgatctcagcttattgcagcctccagctcttggattcaagtgattctcatgcctcagccttccaagtagctggggccacaggcgagcaccaccatgcctggctaatttttgtattttttgtagagaaggggtttcaccatgttggccagtctggtctcaaactcctggcctcaagccatccacctgcctcagccttccaaagtgctgggaatacaggcatgtgccaccacacctggccttaatttttgtatttttagtagagacggcatttcatcacgttgcccaggctggtctcaaactcctgacctgaagtgatctgcccgccttggcctcccaaagtgttgggattacaggcatgagcctccttgaccggccagaacggtttatcttttttatgagtgaataatatcccattgtgtagatggaccacatggtatttattggttcatctgttggacgcttgagttgcttccaccttttggctatggggagtcatgctgctgtgaacacaggtgtacaactatctggatccctgctttcaacttccttggctagatgcccgggagtggaattgttgggttacatggagattctgtgttgaattgaagaaacgccaaacttttccatagcggctgcaccattttaaattcccaccgactgtcagtgcctcgagctgtcagcaccatggacagggatggtgctgtccgaggtgctactgacgccccctctgtgtctttccctccaagcccccccacccccgccgatatccctgcgccctccagatctctgagttttgagggtggagggggacatttaggggaaagttcagtccatagtttggcacctactggtgtctgtatcttaactggctccccttccatcctggctcacaaggctccagttgtaccagccttcattctattcctcaaattctccatcgattcctggctcaaagcacagaattgggctttttactccctgtgtagctgattaagcctgtcctcaattgtcacctcttcggactgtgtacagtaacttccctgttcccgttggcccctgtctccttgcctttaaagcacttcattagtcacagttgcttcacttgtttttattgttttcattgtttattattactattattattattattattattattattattattattattattattattattttgagacaagatcccactctgtcacccaggctggagtgcggtgatgtgatcacggcttactgcagctttgacctcctgagctcaagtgatcctcccacctcaacctcccgagtaactgggactacaggcgcgagtcaccacatgcagctagtttttttttttttttttttgtagatatgggggtctcaccatattgtccaggctggtctcaaacttctgggctcaagcgatctacctgtcttggcctcccaaagtgatgggattacaggtataaagtgttgttggtgttgttgttttgtttgtttgtttgtttgtttttgagacagagtttcactctgttgcccaggctggagtgcagtggtgtcatctcggctcactgcaacctctgcctcccgggttcaagctattctcctgcctcagcctcccaagtagctgagattacaggcaaccgccaccacacctggctaatttttgtatttttaatagagacggggtttcaccatgttggccaggctggtctctaactcctgacctcaggtaatctgcctgcctcagcctcccaaagtgctgggattacaggtgtgagccaccacacccggcctaaagtttttaattaacttttttttttttagagacaggatctcactctgttgcctaggctggagtgcagtagtgaagtcatagctcactgcagcttcaacctcccaggctcaagtgatgctcccacctcagcctgccaagtagctgggactacaggcaagcaccaccacacctggataatttttaaaaaaaaattttggtagagacaagggtctcgctaggttgtccaggctgttctcaaattccagggttcaattgatccttctgccttggccatccaaagtgctgggattacaggcacgagccatcacatcaggcctcacttgcttacttgtttctcatctgtctctgcaagacacacttaaatataagttccatcactggaagaaccttgcatagaacagcacctggctcatggtaggtgctcagtaaatgtcgaatgacatcaagctccaaagacgaagcaaagatccctgagataactcccactctctctctttctctctgattttgttttgttttattttgagatagggtctggctctgttgcccaccctggagtgcagtggcgccatctcagctcactgcaaccacgcccaggcttaaaccatcctcccacctcatcctccctggtagttgggaccacaggcacatgccaccacacctggcttaatttttgtatttttgatggagacaaggttttgccatattgcccaggctggtcttgaacctgggctcaagcaatccaactgcctcagcctcccagagtgctgggattacaggcgtgagccacctcacccagccgacaatacgtttttgttgctgaagtcaccccatctgtggaactttgtgacagtgaatcctagcaaattaacatagaagcccttggctagactcagctgccatgatgtggatggtgtaatggatcaggcaggacaagtcaggttatgccgctgtaacaaataacaccaaagtcttggggggcaaaaacaatacaaaagtaatttctgagctgggtgcagtggctcatgcctatagtcccagctacttgggaggctgaggcaggaggattgcttgagcccaggagtttgagaccagcctgggaaacatagcaagacctcatctctaaaaaactttttaaaatcagctgagcatagtggcatgcacctgtagtctcggctatttgcgaggtcgaagcaggagaatcgcttgagcccaagaattcgaggctgcagtgagctatgatttcaccactgcactccagcctgggcgacagagtgagactgtctctaaaacaaaagtagtcactatctggaatgttttgggtcactgtgactgaggaaagacatctctggaaggcctcatacccatcattaaatactctggtccagaaatgatgcaatacttttatctcactgctcattggctagaaaaagtcacatggtcctacccaactgtaagtggccaggaaaaaacagccctaccatgtgcccagaagagagagcattggaaatatttggtgatcatcactaatgatcaacaggctgggctgcagtagctcacgcctgtaatccaagcactttgagaggccgaggcgagtggattgcttgagctcagtagttcgacatcagcctgggcaacatggcaaaaccccatctctatcagaaatacaaaaaattagccaggcatggtggtgtgagcccgaaatcccagatcctagggaggctgaggtaggaggatcacttgagccaagggaggtctaggctgcagtgagccatgatcatgccactgcactccagcctgggcaatagggcgagaccctgtctcaaaaaattaaaataaaaacaaacaaaaaacaaactattgactaacagagttggaactgagcctcaactggaccttcctggactctctaggctacccctctctggttccagagcttgagactcagctagcgccaagaaattttgaggttacagtgaggacctgggttcagggtcaggggccctgtcctgcaatccacaggagctggccacgaggtgtggacccaagagactgataaagtcacattctcaagagtgttttcttggtctctctctctctgtctctctctgtctctctctgtctgtctctctgtctctctctccccctctccctctccctctcctctttttctttctttctttgacagagtctctatctgtcacccaggctggagtgcagttgtgtgatctcgccttagcgcaacctccacctcctgggctcaagtgattctcccacctcagcttcctgaatagctgagattataggtgcatgccaccatgcccagctaattttctttttaattcttagtagagatggggttttgccatgttggccaagctgatcttgaactcctgacctcaagaaatctgcctgccttggcctcccaaaatgctgggattacaggcatgagccaccgcacccagcctcttggtgtgtttgttgcccagtgtctggaaatggccatgtagaggttggacagggaagaaccaacctggtcaggctgtaggacatcttttggccacccaggccaagtgcagtggctcatacttgtaatcccaacactttgggaggccaaagcaggaggatcgcttgaggccaggggttcaagaccagcctgggtgacatagtgagactctgactctatgaaaaatattaaaagtagctgagtgtgagggtgggcttctgtagtcccagctacttgggaagctgaagttagaagatcgcttgagcccaggagttagaggctgcagtgagctataattgcaccactgcactccagcctgggcaacagagtaaaaccttttataaaaataatattaataataagtttaggccaggcacagtggctcatgcctgtaatctcagtactttgggaggccaaggcaggtaggtcacttgatgccaggagttggagaccagcctggccaacatggtgaaaccccttctctactaaaaatacaaaatagctggatgtggtggtgcgtgcctgtaatcccagcttcttgcgaggctgaggcacgagaattgcttgaacctgggaggcagagattacaatgagccgagatcatgccactacgctccagcctgggtgacagaataagcctctatctcaaaaaataaataaacaaattaaaaaaaataagaggctgggcatggcggctcacacctgtaatcccagcactttgggaggctaaggcaggaggattgcttgagcccaggagtttgaggctgcagtgatctattatcacaccactacactccagcctgggtgacagagcaagaccctatctctgaaacaaaaataataacaaaaaaagcaaaaaacagggaattttcctttccttctttattgccagaaaggaaaaaaaaaatcagggtcctacatttgcacagattggcaggttctgcccattgctagccagctgaccttgggcttcccttcccccattctcaaatttgtcacctgtgtattctacctaattttagtcccagtgggttgctttgtaatttatctttatttttatttttttgagatggagttttgttcttgttgcccaggcttgagtgcaatggcatgatcttggctcaccacaacctccgtctcagctcaccgcaacctctgcctctggagttaaagcgattctcctgcctcagcctcccgagtagcagggattgcaggcatgtgccgccacacttggctaattttgtatttttagtagagacagggtttctacatgttggtgaggctggtcttgaactcccgacctcagacgatcttcccactttggcctcccaaactgctgggattacaggcgtgagccaccatgcccgacctgtgatctaaataaaaggaaacaggctgggcgtggtggctcacacctgtaatcccagcactttggggggccaaagtgggaggatcgcttgacgtcaggagttcgaaaccagcctgggtaacatagtgagacccccccccccgtctctaataaagaataatacattaataaaataaaataggccaggcacggtggctcacgcctgtaatcccagcacttcgagaggccaagacgggtgggatcacctgaggtcaggagttcgagaccagcctggccaacatggtgaaaccccgtctttactaaaaatacaaaaattagctgggcgtggagacgcacgcctgtaatcccagctactcaggaggctgaggcaggagaatcgctcgaacccaggaggcagaggttgcagtgagctaagatcgtgccactgcgctccagcctgggcgacagagcaggacaccgtctcaaaaaaattaataataaaataaaactaagataaaacaaaacagagctccttgcaggaggaaactgacgcacacacctacctggaccagattcttacttttctgccaccagggggcggtcctgctatggcgttcaggcgtctggctccggggtggagctttgctgactaggggagggttaagcaccgagtagctgtgggctgacttactgctttttttttttttttttttgtcgtttagaattaacatttattggaaaggaggggaggggagggagtactgttctcattataaaatcattacctgtgtgcttcagccaggtgcagtggctcatgcctgtaatcccagcactttgggaggctgaggcaggtggatcacttgaggtcaggagttcgagaccagcctggacaagaagatgaaaccccgtatctactaaaaatacaaaaaatttagccgggcgtggtggtggtcgcctgtaatcccagctactcgggaggctgaggcaggagaatcacttgaacccaggaggtggaggttgcagtgatctgagatcacaccactgcactccagcctgggcaacagagtgagactccatctcaaacaaacaaacccacaaacaaattattacttgtgtgcttagaacaaatttataaaacaaatgcaacataaacataaaggtaatatgtgttcatttggaaatatatgttcatggaaagcagagtgtaaaaaaagaaaaggtcacaggaattccaccgcctggatgtgaacactgctaatactcccttcttttttcccaatttccttccttttgttttgttttgttctgttttgttttttgagatgaagtctcactctgtcgcccaggctggtgtgcagtggtttgatctcggctcactgcaacctccgcctcccgggttcaagcgattctcctgtctcagtctcctgagtagctgggattacaggcataagccaccatgcccagctaatttttgtatttttagtagagatggggtttcaccatgttggccagctggtcttgaactcctgacctcaggtgatctgcccaccttagcctcccaaagcaatgggattacaggcgtgagccccagtgcctggcccagagtcagttttttattctgcaatcaatttaaatgtcctagatttgcttttattgcaagtcagtgccttgaaagaaaagatgagagcgtttgatgacatgaaaacatgcttaacaaagacagaagacaaacaaagccaatagcctggaaggaaatatttgtcacataaattaggcagatgatcgagctttgttcatgtttattgaacacttactattatatataccagccattgtttggggggggttgtatttatcaaataacttaatttttagccctttgatataggtagtattattatttccttttttatctttttggtgtttttgttggtgttcttgctgtttttgagaatgggtaccgctctgtcgcccaggctggagtgctattgggcaatcatatctcacagcagcctcgacctcctgggctcaagcaatcctcccacctcagcctccccagtagctgagactacaggcccctgtcaccacacctgactaatttgttttattttttcaaagtgagatggcggaggcgggtggggggtctcactttgttgcccaggccggcctcgaactcctgggctccagcgatcctcctgcctcagcttcccaaagtgctgggattacaggtgtgagccaccatgcccggccagttttcacttcttaatttggcaaatgctaaaaatattaacacatccagtcacactgaaagttgggtgaataagaaacatcttcacagtgttaggctgggaaactgtcaattatggagattttagggggaagggaatttgactgtcatcatgcaacaaatttttttttttttttttttgagacggagtctcgctctgtcgcccaggctggagtgcagtggcgtgatctcggctcactgcaagctccgcctcctgggttcatgcccttctcctgcctcagcctcccaaggagctgggactacaggcgcccgccgccacgcccggctaattttttgtattttgagtagagacggggtttcaccatgttaaccaggatggtctcgatctcctgaccttgtgatccgcccgccttggcctcccagtaaacaacaaatataaagcgcataacttttgacctagccgggtttcgtccaacaatcaatcctctataaacgcatgcgtctaaagatgtgtgttcctcacagcgcttttctgcaatgatgccgttgcttataaaagtgaaaattggaaaacagtctcagtgactgacaacagaggcatagtttaataaattagggcacagtaccttacgggaatgctctgaagccattaacaagaatgaaacagacttatagctattgacataaaaaaaattcctaggtactctgctccacggataaaaagagtcatagaacattgtgtacagtatgatcacatttacgtccaagaccgtccatgacacacaggtttgtacatgcacgggatgccctgggaggatagttccttgggaagaaatatcagggtgggaatttaagggggagaatttcaatatttttacttttctactgtttgacactttaacaatgagattgcattattgtgataatttttaaatttatttgataatttttaaagcccccagaaatgatcctgttttgaaattgttaaatatttctttttgttttacttatttatttattttcgagacagggtctcatcccatcacccaggctgtagtgcagtggcactgtctcagctcactgcagcctctgcctcctgggttcaagtgatcctcccacctcagcctcccaagtagctgggactacagggcatgtaccaccatgcctagctaatttttttatttttagtagaggtgaggtctccctatgttgcccaggatcgtctcaaactccttggctcaagcaatctgcctgccttggcctttcgaagtgctaggattacgggcatgagccaccttgcctggctctttttaaattttattattttttattttacaaaagtagagacagggtctcactgttctgcccaggctggtgttgaactcctgggctcaagtggctggcccacctccacctcccagagtgttgggatcacgggcttgagccatcgcacctggcctaaatatttctttaaaatgacagaaagccgggcatggtggctcactcctgtaatcccagcactctgggaggccgaggcaggcggattacctgaggtcaggagttccagaccagcctggtcaacatggcaaaaccccatctctactaaaaatacaaaaattagtcccagctacttgggaggctgaggcaggagaatcgcttgaacccgggaggtggaagttgcagtgagtcgacatcgcactactgcactccagcctggacgacagagcaagactctgtctcaaaaaacaataacaaaaacaaaacagaaaataaaacataacagaagacaggcagagcaacagtctgggaggaaatatttgtcacatcaattaggcagaatatcaagcattgttcatgtttattgaacacttattgtataccagccactgttttgaggcgggggggggttatggttatatttatcaagtaacttaatcctgtgatcatggttgtttctgacatttcagtgttatgaatgaaaccgggatgaatatctttttttttttttttgagatggagtttcactcttattgctggagtgtaaaggcacgatctcagctcactgcaacctccatctcccgggttcaagcaattctcctgcctcagcctcctgagtagctgggattacaggcatgcgccaccacgcctggtaaattttgtatttttagtagagacagggtttctccatgttggccaggctggctcgagctcccaacctcaggtgatccacccgccttggcctcccaaagtgctgggattacaggcatgagccacggcgcccggcgaggggatgaatatgtacgaatcttcacgtgcatctgtgaggatatctttatgttatctctaatttttgtgtttggtttatttcagagttgggatctcactatgttgcccaggctggtcttaaactggacgattctccggcctcagtctctcaaagcgctgggattactgacaagccactgccccagtcctgcttagttttctttacattacaaagcaaacttttgtgtcagggactaaaatcaggtagaatacaaagatggtaaaacagtctgggagagcttaaacccgaggccatctagctggcaagcggcagaacttgccactctgtgcacgttcaagtccctgttcttttgtttgtttcttgttttttttttagagacaggttctctctctgtcgcccagctgggagggagtgcacaggcatgatcatagctcagtgcagtctccacctcctaggctcaatcgatcctcccacctctgcctcccaagtaggtgggactagaggcatgcgacaccatgcctagctcatttttaattttttttttataaagacggagtcacggctgggcacagcagctcatgtctctaatcccagaactttgggaggctgaaaccagcagatcacgaggtcaggagttcaagaccagcctggccaacatagtgaaaccccgtcctactaaaaattcaaaaattagccaggagtggtggcaggtgcctgtaattccagctactcaggaatgctgaggcaggagaatcacttgaactctggaggcagcggttgcagtgagctgagatcatgccactgcactccagcctggggcaacagagtgagacttagtcctaaaaaaaaaaaaaaaaaaaaaaaaaaaaagccaggcatggtgactcacacctataatcctagccctttgggaggctgaggtgggtggatcacctgaggttgggagttcgggaccagcctggccaacatggagaaaccctgtctgtactaaaaatacaaaaattagatgggcgtgatggcgcatgcctgtaatcccatttactcaggaggctgaggcaggagaatcgcttgaacccaggaggtggaggttgtgataagctgagatggcgccactgaactccagcctggtcaacaagagccaaactccatctcaaaaaaaaaaaaagatattgatttttaaatttttcaattcccaattattcattgttatcgtgtagaaatacagtttagttttatatatagaccttgtattctacaacttcactaaatcacttactggatctagtaggttttttgtacattcattctgattttttgtgtagatgatgttttatttttctttcttttcatatatgttcgctatcatctttctcttctttccaagtctgtgtgctttttatttcatttcctaccttattgcactgtctgggacttccaatacaatactgaatagaggtagtaagaacagacatccttggccaggcatggtggctcacgcctgtaatctcagcactttgggaggccaaggtgggcggatcacctgaggtcaggagttcgagaccggcctggccaacaatgcggaaccccgtctctactaaaaatacaaaaattagctgggtgtggtggcatgtgcctgtaatcccagctacttggcagcctgagttgggagaatcgtttgaacctggaaggcagaggttgcagtgagatgagatcgtgccactgcactccagcctgagggacaaagcaacaacaccctgtctcaaaaaacaaaacaaaaaccaggctgggcgcggtggctctcgcctgtaatcccagcactttgggaggccgaggtgggcagatcacgaggtcaggagatcgagatcatcctggccaacatggtgaaaccccgtctcaactaaaatacaaaaaaaaaaaaaagaagccaggcaaggtggcacgcgcctgtaatcccagctactcaggaggctcaggcaggggaattgcttgaacctgggaggcagaggttgcagtgagctgagatcgcgccactgcactccagcatggcgacagagagactgtctcaaaaaaaaaacaaaacaaaacaaaactggacatccttaccttgtttccaatcttaggataaaacattgagtcttactattaagtatgatattagccatgtttcatgtatttctttgtttaatctcttaatttggcaattccattgattgattttattttattttatttatttttttgagacaaggtctccctcttatcccccaggctggagtgcactggcgcgatctcagctcactgcaacctccgcctcccgggttcaagcgattctcctgccttggtcccccgagtagctgggattgcaggtgcctgccaccacacgcagctaatttttttatttttagttgagacggggtttcaccatgttggccaggctggtctcgaactcctgacctcaggtgatccacctgcctcagcctcctaaagtgctgggattacaggcatgagccatcacacccggccactttttttttttttttttaaacagagtctctctctgagccaccttgcccagtcccattgattgattttcaaatgccgaacccaccttgtatccctcggacaaattccacttgatcaggacatgttttcctctttatatactcctggactcaatttgctaatattttgtgatggattgtttgtatcgatgttcctgaagaatattggtctgtacttttctttccgggcatggtggcaggtgcctgcaatcccagctactcaggaggctgaggcaggagaatcgcttgaaccagggaggtggaggtttgcagtgagccaaggttgtgccattgcactccagcctgggtgacaagagcaagactccatctcaaaataaaataaaggcgtagtggttttgcattttgaggaacttgtctatgtcaggtaaattgtcaaatttattgccacagagttgttcataaaatttcctcattatccttttaatgtccatagggactgtagtgatatcccctcttttacctcagtgtgcaaatgcttttcaagcctctgcttctctcacattttctattgtcccattggccaaaataagtcatatggccaaaccctgagtcagcatgggaggggactccccaagggcgtggatacgagcagatgtgaacaaaccgggaattattacttctacaatccaccacacgaagtccctccctgtggtaagtttctgcccctaagggacagatttgttcacattagttgcttggtgatttattcatatatatttatttatatatttattaatatgtatttatttatatatttattaatatatatttatttatatatttattaatatatatttaacaaatacattaataaatatatgttaatatatttattataaataagtttatagaaatatatatatatggccaggccaggcgcagtaactcacacttgtaatccgagcacgttgggaggccgaggtgggtagatcaattgaggttaggagttcgagaccagcctgaccaacatggagaaagcccgtccctactaaaaatacaaaagtagtcaggcgtggtgtcgcatgcctgtaatctcaggtactcgggaggctgaggcacgagaatagcctgaacccgggaggcggaggttgcagtgagccaagattgcgccattgcactccagcctgggcaacaagagcgaaactccgtctcaaaaaaaaaaaaaaaaaattagctgggcatggcagtgggcacctgtaatcccagctacttgggaggctcagccaggagaattgcttgaacctgggaagcagaggttgcggtgagccaagatcgcaccactgcactccagcctgggtgacacagcgagactctgtctcaaaatgaaataaaataaaataagtaataaaataataaactctatgacgactgcaagtcacttcacaccttgaaaatgatgtttacatctaggatatatatatagacaaggtctcactgttttccaggctggcgtgcagtggcgtgatcacggctcactggagcctcaaactcttgggctcaaaacatcctcctgcctcagcctcctaagtagctacagaggtgctccaccacaccctgctaattttttaaatcttttgtagagatgtgggtctccctttgttgcccaggttggtctccaattcctgggctcaagcgatcctcccgctttggcctcccaaagtgctgggattacaggcataagccactgcacccagccttaggatacataacttagtagagaagttgagaagtgaggagagcatactgaaaggtaagtcagggtgatgggggctcagaaagtaccagaagggccaggaaacagattccacaaacatcaattgagtatttactgtatgcatgaatctgctaaaggaataactgtgtggtcaacagagctggaaaatatggcttttctcaataatgagctccctgttcacagaaagaatcaaggataggctgaattttgtgagctccggggaaaggtttggactagcagatgtttaaggctctgttcttttggaatagtctataattccacaacagggatagtgtttgggggaaagatagaaggtggacaagaaacagaaaatgaggacactggctgggcgtggtggctcacgcctgtaatcccagcactttgggaggccgaggcgggtggatcacctgaggtcaggagttcgagaccagcctggccaacatggtggccaacgtggtgaaaccccatctctactaaaaatacaagaattagctgggcattgtggtgggtgcctataatcccagctacttgggaggctaaggcaggagaatcgcttaaacccgggaggtggaggtttcagtgagctgagatcacgccactgcactccagcctgggtgacagagtgagactctgtcagaaagaaagaaggaaagaaggaaaaaaagagaggagaaagaaagaaggaaggaaggaaggaaagaaggaaagaaagaaagaaaggaaggaaggaaaggaaggaaggaaggaaggaaggaaggaaggaaggggaaggaaggagaagggaagggaagaaaggaaggaaggaaggaagagagagaaagaaagaaggaaagaaagaaagaaaaagaaagaaagaaagaaaaagaaagaaaaggaaagaaaagaaaagaaagaaaggcaggccaataggccaggtgtggtggctcacgcctgtaactccagcactttgggaggccaaggtgggtggatcacttgaagccaggagtttcataccagcctggccaacatggtgaaaccctatttttactaaaaaaattaaaaaaattaagttacccgggcatggtggtggctaacacttgtagtcccagctacttgggaggcagaggcaggagaatggcttgaacctgggaggcagaggtggcagtgagccgagatcgtgccactgtactccagcctgggtgactgaggaaaactccgactcaacaaaacaagacaaaaaaccaacaaaaaagaggacaccgaaggaggaaggatgggagtgcaggagagaaccgcttgggagaggagagaggaaagggatgctggataggcagaccccaaagtttgcgcttagcccgggagggttcttggcttcaccgaggaaataattcaagggtgagctggtggtgtaagttttactgaagtgacagcagtagcagaggttctgctcctggcagagcagggctgccccataggcagggagcccagaatagcagctgagaggcagtgctgcagtgagacttatacctacttttaattgcatgcaaaggaaggggcagattatgcagaaatttctagaaaagggtggtaacttctgggtgactgccatggaaacgggtggtaagttctgcgtgttgctatggcaatggtaaactgacatggcacactggagggcatgtcttagggagaggtgctttcacctgttccccgtttcagctagtgttttttgtttgtttgcttttgggggacggaggctcactctgctgcccaggctggagtgcagtggtgtgatcttggctcactgcagcctctgactcccaggtcagcctcccaagtagctgggattacaggtgcccaccaccacgcccatattttcagtagagatggggttacctcatcttggccaggctggttttgaactcctgacctcaggggatccaccagcctcagcctcccaaagtgcggggattacaggcatgagccaccgtgcccaggctgtttcagctagccttcagtctggtccaggctcttagccccatctcgggagtccagtcctgcttcctacctcaaaaggagtgatgtggccaccaggtgcggtggctcacacctgtaatctcagcactttgggaggctgaggcaagtggatcaccagaagtcaggagtttgagaccagcctggccaacatggtgaaaccctatcgctactaaaaatacaaaaattagctgggcgtggtggcgggtgtctgtaatcgcagctactttggagactgaggcacgagaatcacttgaatccaggaggcagaggttgtagtgagccaagatcgcaccactgcactccagcctagatgacagagcaagattctgtctcaaaaaataaaacaattaaaaaaaaagaatggatggtgggtgatgatgcagagaggtttaggaggggaggttttaggtaaaacctccctcactgactcctctcactgacttcttcatcggacaccctctttcctgccttcccacacacataccgctaagactgtcttccccgaggtcactataggacgccgtgtcccgagatccaatgcaaccacccacttcttatctcacacagcctccaggccagcccaagacactggagactactcccaccttcccaaagcctttgttcccttgttagtttgatttcctccctccctggaagctcagagcctcctctttctcctccatcccctcccagggccacatcctcaacccatgtctcacattccatggagcttcatttatatcactggcacacctgtattcccaatctatgtttgttggtttgttttgagtcagagtcttgctctgtcccccaggctggagtgcaatggcaccatctcggctcactgcaacctctgcctcctgggttcaagcgagtctcctgcctcagcctcctgagtagctgggattataggtgtgtaccacttttttgtattttattttattttattttttcgagacagggtctcactctgtctcccaggctcgggtgcaatggcatgatctcgcctcactgcaacctccacccacctcccaggttcaagtgattctcctgtctcagcctcctgagtagctgggattacaggcatgcaccactatgcccagctaatgtttgtatttcagtagagacgggatctcaccatgttggccaggccagtcttgaactcctggcctcaagtgatccacccgccttggcctcccaaagtgctgggattacatgtgtgagccaccacacccagccttgtattcctactcttgaccatgacttggagggtctggatctgcagagcccagaaactcctgcaccgtgtagtcttggtacacggaggtatcatgaaaccccaaagtttgtatgtgatttgctttttcctgtgtatctgcatggttgataaggacaagaagataccacagtttcagaggatgatacagacattcatttgtgttgggctcctgttggcttcaccaatatcaaaaaagcttccagctgggcgtggtggctcatgcctgtaatgccagcattttgggaggccatggcagactgttagtttgagcccaggagtttgagaccagcctggacaacataatgagaccccatctttttttttttttttgagacagagtctcgctctgtcacccaggctggagtacagtggcgcaatctcagctcactgcaaactctgcctcccagattcaagcgattttcctgcctcagcctcctgagtagctgggactacaggcgcctgccaccacgcccggctaatgttttgtatttttagtagagatggggtttcactgtgttagcctggatggtcttgatctcctgacctcgtgatctgcctgccccggcctcccaaagtgctgggattacaggcttgagccaccgcgcccggccgagatcctatctttaaaaaacaacttagccgggcatggtggcacccacctgtggtctcagcaacttgggaggctgaggtgggaggatcgcttgagcttgtaaggtcgaggctgcagtgagctatgatcgtgtcactgcactccagcctgcgaaacagaaaccctgtctcaaaaagaaaagaaaagagcagctggagcccccttatctctgcacgtctcccccactctcaatcaccttggtctttttttttttttaatctaccaaagtcactttctcgcctctgtctgcccaaacacctccttctaccagagggagggaaaggaagtttcttcctatcaaggacatataaatgacggagagcacacttgaaataatgtctctcccttgacctacatcagtagtgagcatctgcatgaatgtattgatgtgtgtgtgcacgtgcgcagatgttcgcgttaatgcatgcaattctgtgggtattactggttacctttgtaaatatttgagtatgtatttgtggatattatctatattttattttattttatttattttgacacagagtctcgctctgtcaccctggctggagtgcaatggcgaaatctcagctcactgcaacctccgcctcctgggttcaagcgattctcctgcctcagccttccaagtagctgggattactggcgcgcgccaccatgctgggctaattttttgtatttttagtagagacgggatttcaccatgttgggcaggctggtctcaagctcctgacctcaggtgatccgcccaccttggtctcccaaagtgctgggattacaggcgtgagccactgcgcccggcccaccattatagtgtcatacagagtagtttcgttgccctaaacatcctctgcattccacctactcatctgtcctccctcttaacccttagtaaccactgaggttttactatcttcatagttttgccttttccagaatgtcgtggagttggagaagtacacaataagtggccctttcagactgtgtttttcacttagccatatgcacctaagtttctttgatgtcgtttcacagcttcagagctttttttttttttcgagaaggagtcttgctctgtcacccaggcgggagtgcagtgacatgatcttggctcactgcaacttccacctcccaggttcaagtgattctcgtgcctcagcctcctgagtagctgagattacaggcaagcgccaccacgcccagctaatttttgtttgtttttgtttttgaggcagagtctcgctctgtcgcccaggctggagtgcagtggcacgatctttgctcactgcaagctccacctccccgattcacgccattctcctgcctcagcctcccgagtagctgggactacaggcgcccgccaccacgcctggctaatttttttttttttttgtatttttaatagagatggggttttaccatgttggccagggtggtcttgaactccaggcctcaagtgatccacccaccttggcctcccaaagtcctgggattacacacatgagccaccgcgccggccttttttgctttttgtttcaaagagcgatagggtcttgctgtgtcacccaggctggaatgcggtggtgtgatcatagctcactcctctcactcttttggggatcttgtgtattggtggaggtgcctgggcccgctctcatcatcatgtggtaaagatgacaaatttctggcctccttggtggccctccgggatgtgaaactcaacctgtccaagacgaaactcatcctccccacccagcctggcccctcatctcctgtccccatctcagcatgcagcaccaccatctacctgcttgcgaaaggcagagatctgggcatcttccaagactccgccctccctctcctggccgcctgttcccatccaccagcaagccctgccaattccatctcccaacacattctgcacccgtgcgtgctccccggccccaaagccacaccctggggctgacctcgttactgaagcctctgtggtctacctgaaattgtcttggcaacaccgggtcccctaagggcaacctgaagctcacagatgtgcatgggtttttctggaccgagctttcaggtttgattttgtcatccgtatgtacgcagttttctttctttctttctttctttctttctttctttctttctttctttctttctttctttctttctttctttctttctttctttctttctttctttctatttttttttttttgagacagagtcttgctctgtcacccaggctgcaatgtagtggcacaatcacagctcgctgcagcctccgcctcccgggttcaagcgattctcctgcctcagcctcctgagtaactgggattacaggtgtgcaccaccatgcccagcttacttttttctatattcttggtagagatggggtttcaccatgttggccaggctggtcttgaactcttgacctcaagtgatccgcctgcctcggccccccaaggggctgggattacaggagtaagccactgagcccaacctgttcatggtttttaaggggacgatgattcctcctgctgggggacatttggcaatgtctggagacattttgggttgtcacaactggagggggctgctagtggcatctggtaggtagagaccaagggtgctgctaaacttcatgcaatgcacaggatggcccccacagcaaagagttatccaaatattctacatctcaatagtgccgtgatcaagaaaacctgtacttgtactacccgaagtgtgagctgcagactgcagctggtccccaagctgttgatttcccatttagatgagagagtccagaaaaaaaaagctttcagaatctttatttttatttatgttttttgagacggagtctcactctgccgcccaggctggagtgctgtggcataatcttggctcactgcaacctccgcctcccaggttcaagagattctcctgcctcagtctctggaatagcttgcaccaccatgcctggctaatttttgtatttttagtagagacagggtttcaccatgttgcccaggctggtttcaaactcctgacctcaggtgatctccctgcctcggcctcccaaagtgctggggttacaggcatgagccaccgcaccctggccagcttttagaacctttaaaggctgggtacagtggctcatgcatgtgatcccaggactttgggaggccgaggcaggaggatcgttggagcccaggagttctagtgcagcctggcaacatagcgagaccccatctctgcaaaataaaaaataaattagccagatgtggtggcacatgcttgtggtcccagctgcttggaaggctgaggtgggaggattgcttgagcctgggaggtccaggctgcagcaaaccatgatcacaccactgcactccagcctgggtgacagagtgaagcactccagcctgggtgacagagtgaaaccctctctcaataaataaataaatagaatcattatagtaatttcacacagtaattttatgacagctgggctcatgttctgcatgccttttaaattccttcctgtattaatagaattttttatttttttattttcattttcttttttttttttttttttgagatggagtttcgctctcgttgcccaggctggagtgcaatggcgctatctcggctcaccacaacctccgcctcccaggttcaagaaattctcctgcctcagcctccagagtagctgggattacaggcatgcgccaccacgcccggctaactttgtatttttattagagacgggcgtttctccacgttggtcaggctggtgtcaaactctcgaactcaggtgatctgcccgccttggcctccaaaagtgctgggattacaggtgtgagccaccgcgcccggccttttattttcattttcttggagacaaggtctcactctgttgcccaggatggagtgcagtggtgcgatcacagctcactgcagcctccaactcctgggctcaagtgaccctctcacctcagcctcctgagtggctgggactacaggcttgtgccaccatacccagctaatagactttttaaagaacagtgttaaattttcagaaaaatcaagtagatggtacagagagtttgagtacactcattctcccccaacacatacacaatacaatttccccttttattaacatcttacactggtatggcacatttgatacaatcaatgaaccaatttttttttttttttaagtcagagtctcgctctgctgcccacactggagaggagggggtgcgatctcagctcactgcaatctccgcctcccaggaatgaaccaatatggatacatttttagtaactaaagtccattcttcattcagtttcttcagctttcccttaatgccctgtttctgtcccaggatcccatgcaggatttcacatttatttatttgagacagagtctcactctgtcacccaacctggagtgcaatggcgtgatcttggctccctgcaacctccacctcccaggttcaagcaattctccagccttagcctctcagttcctgagaaactgtcccagttgaatggaaggagaagtgatgactaaatgtcatgtgaggccgggtgtggtggctcacgcctgtaatcccagcactttggtaggtggagatgggcggatcacctgaggtcaggagttcgagaccagcctggccaacatggtgaaaccccgtctctactaaaaagacaaaaattagccaggcttggtggtgtgtgcctgtaatcccagctactcaggaggctgaggcaggagaatcacttgaacccaagatgcagaggttgcagtgagcccagatctcgccacagcactgcagcctgggtgacagaatgagactttgtctcaaaaaaaaaaaaatagccaggtgtggtggcacccacctgtagtcccacctactcaggaggctgaggtgggaggattgcttgagcctaggaggtggaggctgcagtgagctgtgatcgcaccactgcactccagtctgggcaacacagcaagactgtgtctcaaaataaataaataaataaaagtacatactaacaacataatttctgactgtcaaggttgtctttgactgtctgctggagtagtgtgttaggtttctccactgtaaagttattcttttttttcctctttcctccttccatactgtgatctttggaaggaaggcaccccgtgtagcttacacctaaggattggagagttacgttccactccttgagggcagagcatctacatgaattatttgaaattcttctgcaggggaagaagtccctcatcccctattatgaaattatgtgctccttttttttttttttttttttttttgttgcccaggctgcagtgcacttatgcaaacacggctcactgcagccccaacctcccactcttaagcaatcctcccacctcagcctcctgaatagctgggattacaggtgtgcactgccacacccagctaatttctttaatttgttttatttttagtagagatggagtttcgctatgttgtaaaggctggtctggaactgctggcctcaagcgatcctcccgccttggcctctcaaactgctgggattacagacgtgagccaccatgcctggcctgctcatttcttgacatcagcatggactcacaaatattcattttatatttcggattataatcatccgacgtcattttttttttttttttgacagggtctctctctgtcacccaggctggagtacagtggtgcaatcatagctaactgcagtctcaaactcctgggctcaagggatcctcccgccttagcctcccaagcagctgggaccacaggcatgcaccgccatacctggctaatttttaaatgttttatttttcagcctgggcaacatggtgaaactccatctctactaaaaatacaaaaacttagccgggcatggtggcacgcacctgcactcccagctaatcaggagtctgaggcacgagaatcatgtgaacacaggaggtggaggttacaatgagttgagatcttgtcaccacacttcagcctgggtaacagagtgagacttcacctcaaaataaataaatacataaatacataaataaaaatttaaaaaaaaagaatggggccgtgtgtggtggcttacacctgtaatcccagcactttgggaggctgaggcgggcggatcacctgaggtcatgagttcaagaccagcctggccaaaatgttgaaaccccatttctactaaaaatacaaaaattagccaggcatggtggcgtgcgcctgcactcccaactactcgggaggttgaggcacgagaattgcttgaacatgggaggcagaggttgcagtcagctgagattgtgccactgcactccagcctgggtgacagagtgagactccatctcaaaaaaaaaaaaaatgaagaagtggtgctttaccagggagagtctgggcagcaaaacaccctccggcgtctcctggcattgctcctggctgcactccagggacagtgcccttccttgagcaccagcttggtccttccccagggcctttgtccttgccagttgctctgcccagaatgctcttctcccatctgcttcttttcatcgccccattccctgccctacctctccctcctcctcgaagaagcttgcccagacaactgccctagcaaaagcagctcccaccctgactgtcactagctcctttgctagactgtgtgattgtcccaatattttatccctaggtgaaatgatctttttcttttcttttttttttttttttgagacggagtctcgctctttcgcccaggctggagtccagtggcacgaacttggctcactgcaacctccgcttcccaggttcaagtgattctcttgcctcagcctcccaagtagctgggactacaggcgcgtgctaccacacctggctaatttttttgtattttcagtagagatggggtttcaccatgttagccaggatggtttccatctcctgaccttgtgatccacccgcctcggcctcccaaagtgctgggattataggcatgagccaccgcgcctggccatgaaatgatttctttcactcgtattagtctattgcatctaaatgcaactgtcatgaggcgcaaggacagggatggcctttggcatgcacaatatttgttttttgttttgttttgtttgttttttgagacggagtctcgctctgtgccccaggctggagtgcggtgcgcgatctcagcaaactgcaacctccgcctcctgggttcaagaaattctcctgcctcagcctcccaagtggctgggactacaggtgtacaccaccacgcctggctaatttttgtattttattttattttattttactgagacggagtctcgctctgttgcccaggctggggtgcaatggcatgatcttggctcactgcaacctccgcctcctgggttcaagcgatttccagctaatttttgtcttttaagtagagacgaggtttcagcaagttggccaggctggtcttgaactcctgatctcaagtgatccgtccacctcgacctcccaaagtggctaggattacaggcgtgagctagcacgcccagcctaatttttgtattttagtagagacagggtttcaccatgatggccaggctggtcatgaactcctgacctcaagtaatccgcttgcctcagcctcccagagtgctgggattacaggtgtgagccaccgtgcccagaatgttggttttttgttttgtttttgtttttgagataggatcttgctctgttgcccaggctggagttcagtggcatgatcacaactcgcgtcactgcaacctccacctcccaggctcaagggatgctcctgcctcagcctcccaagtagctggaactacaggttcaagccaccatacccagctaattttttgtattgtttacagaaatggggtttttccatgttgcccaggttggtctcgcactgctgggctcaagtgatctaccgcctcggcctcccaaagtgctgggactacaagcatgcaccaccccgcccggctaatttttgtattttgtgtgtgtgtgtggagacaggatctcactgtgtggcccaggttgttgtcaaactcctgggctcaagcaatctgcccacctcagcctcccaaagtgccgagattacaggcgtgtgccaccatgcccagtcaatattgttcttaaaaattattttgaggctgggcatggtggctgggcatggtggctcacacctgtaatccaggcactttgggaagccgaggtggaaggatcgcttgaggccaggtgtttgaaactagcctgggcaacatagccagacccatctctacaaaatattttttaaattagcagggtgtggtggtgcacacctgtagtcctagctactcaggaggctgagacaggaggatcgcttgagcccacgagttccagcctacagcgaactatgattgcgccactgcactccagcctgggcatcagagcgataccctatttctacaaatatatatataacatatatacatatatagcatataatatttacatatatataacataatatttacagatatatatatacacacacactatatataaataattcttttgaaatattttggacatgtccccctgaggtacctggggagtgctgataataaactccatactggccaggcacggtggctcacgcctgtaatcccagcactttgggaggccgaggtgggcgaatcactttaggtcaggacttcgagaccagcttggccaacatagtgacaccccatctctactaaaaatacaaaaattagccgggcgaggtggcaggtgcctgtaatcccagctactccggaggtggcacgatctcagctcactgcaacctccgcctaccaggctcaagtcatcttcctgccttagcctcccgagtagctgggattacaggtgcccagcaccacacccagttaatttttgtatttttagtggagagggggtttcgccatgttgcccacgctgctcttgaactcctgacctcaagtgatccacccgcctcagcctcccaaagtactgggattacaggcatgcgccactgtgcccgtcctgaaggtcatagacattgagagaagggtgaaccagcctcatactggaagggctgcaaagtggctcagctggtggaccctagatccggtgacttggggctcaaagcctccttctattctccttggtgtatgactcagtttttccatctgtaaaatgggtacaatcctcattatgctggtgttggcgtgaggattaatgagacgatgtcgggcatataacactctcagaaattgtcatctatgagtctgatccctgaagtgcacacacaggtagaattttgcagatgattttatggggtttcacatactcccccaaaccaaatcctgaactcctgacctataaaccctctaagtcatccccacccccagcttaataaccaggctctgtctaatgagttaggaggtgtaagagcccaaagagctccaggtgtgggaggaggcgggaggctggaggggggctcggggaggggctgccccatgcacacagggcagccagtgtgtctgaggctgcctaggccgtaggaacaggcccccaggggcaggtgggatcttgattccagcctgcagtgtgtgggtggggcagtctagaccagccaggctttccagtccgcccagtgtgggggttgggccagtggaggcccctggaggcagggacaggagcacttgacctgcaccaacacctctggacctggacggccccccacccatccttcccaaactgcagccccctcccgggatgggaagctgaacccgtgtatccaccccacatctccccggattgtgtgtgagcatgctgcatttgctgcctttgctgggtttgtccttggggtccacggaggtcatgggaaccatcccaggaaaagcaaacccacgtgtgagccggcaggacacgccaagctcacagaggggcaggttatggcagaagcaccctttcctgctggaaatgcttccccgggccaggaaccccaggtctccagatggggaaactgaggtccagtggggaaaagaccttgtttaggtccttcgaggggactgggacaggagccggggcatgcgtcatccacatcagcacctgtgctcacacacacagacactggcccctttgcgcacccacacccactcctgcacgggcacatccagacaggagggcccacgccccagctcccctccctcggcacacccacccccatgcctgctcacatgctccggaccatgagacccacgccccaaacacacgtgccatttcaacaaagagctagctctggggccaccatccggggtcaagggtcttggagaccaccttgccacagcgtctttccatttcatagcgttttgtttttgtttttttttatgagacggagtttttttgctctcattgcccaggctggagtgcaatggtgcgattttggctcaccgcaacctccacctcccaggttcaagcgattctcctgcctcagcctcctgaatagctgggattacaggcatgcgacaccatgcctggctaattttgtgtttttagtagagatggggtttctcaatgttggtcaggttggtcttgaactccagacctcaggtgatctgcccaccttggcctcccaaagtgttggaatttatttatttatttatttatttatttttttttttgagacggagtttcgctcttgttgcccaggctggagtgcagtggtgcaatctcagctcaccgcaatctctgccttctggtttcaagcaattctcctgcctcagccccccaagtagctgggattacaggcatgcaccaccacctctggctaattttttttttatttttagtagagatgggtttctccatgttggtcaggctggtcttgaactccggacctcaggtgatccgcccacctcagcctcccaaggtgctgggattacaggcgtgagccactgggcccggtcttttttttttttttttctttttgagatggagtcctgctctttcgcccaggctaaagtgcagtggcacgatctcagctcactgcaacctctgcctcctgggttcaagcaattcttctgcctcagcctcctgagtagctgggatcacaggcgccagccaccacacacagggaatttttgtatttttagtagagatggggtttcacaatgttggccaggctggtctcgaattcctgacctcaggtgatgcacctgcctcagcctcccaaagtgctgggattacaggagtgagccactgtgcccggcctgtatgttatctttttacgtatcactttctgagtgcatttgtgtgcatgaagctgacatttacatttgtgtgaatttgtgaatatttgtgtgagtctgtgagcacttattcctgttcacaaggtgacaaggtgcctatgtatgtgtgtgtgtgtgtgtgtgttctgaaagtaacacacgtttttcttttcttttttttttttttttgagacagagtctggctctgtcacccaggctggagtgcagtggcaagatctcagctcacttcaacctctgcctcctgggttcaagcgcttctcctgcctcagcctcccaagtagctgggattacaggcatgtgccaccatgcctggctaatttttgtatttttagtagagacagggtttcaccatgttggtcaggctggtcttgaactcctgacttcaagtgatccacctgcctcggcctcccaaagtgctgggattacaggcttcagccaccgtgcctggccgaaagtaacacacttttctttccaggcctgtaaagaacgaactcacacaaacacttgtgcattcacaattatatacagctaagaggcatgcaggggatattttgacaaaaatacaatggagggccaagcacagtggcacatgcctgtaatcccagcactttgggaggccgaggtgggaggatcccttgagcctaggagtttgagatcagcctgggcaatataaggagatcccatctctacacaaaacaaaaaattagccagggatggtggctgcagtgagccatgattgtgccactgcactcaagcctggggtgacagagtgagatcctgtccaaaaaaaaaataaaacaacaacaacaaaacaaacaatagaacaaaagcaaatattaaaatattaaaaacatccggctgggcgcggtggctcatgcctgtaatcccagcactttgggaggccgaggcgggtggatcacctgaggtcaggagatcaagaccatcctgactaacacaatgaaaccccgtctctactaaaaatacaaaatattagctgggcatggtggccggcgcctgtagttccagctactggggaggctaaggcaggagaatggcgcgaacccgggaggcggagcttgcagtgagctaagattgcaccactgcactccagcctgggtgacagagcgagactcggtctcaaaaaaaaaaaaaaaaacaaacagaaaaaaaaaaaccaaaaatccacaaatcggtgcttagaccttacaaataaacacacaattgcactcatgtacacaaatatttgtactcaacgcgttcacacacacttccatacttacagacacaatcagattcatacacagaaatacatttgcttacacagatatgaattcctagataaatatgcacatttgaactctcacaaaagcattcagacacaggcattcttttttttttttttaatgtgacggagtctcactctgtcgcccatgctggagtacagtggtgcaatcctagcttgctgcaacctctgcctcctgggttcaagcgattctcctgcctcagcctcccaagtagctgcaattataggtgtgggcaaccacgcccggctaacttttgtatttttagtagagatggggtttcaccatgttggccaggctggttttgaactcctgacctcaggtgatccacccgcctcagcctcccaaagcactgggattacaggcatgagccactgcacccagcagaaacaggcattcttgcacaggtatacctgctttcatgcctacacaatctgtcacaggcacccaccatatattcaaatccacaaagatactcacatataaacacacatatatgcacaaaaatatagtcaggaactgctcatcataaatcacacatctgctgggcgcggtgcctcaagcctgtaatcccagcacttcaggaggccgagttgggcggatcacgaggtcaggagatcgagaccatcctggctaacatggtgaaacccggtctctacttaaaaaaaaatacaaaaaaccagccgggcgtggtggcgggtgcctgtagtcccagctactcgggaggctgaggcaggagaatggcatgaacccaggaggcagagcttgcagtgagccaagatcgcaccactgcactccagcctgagcgatagagcgagactccgtctcaaaaaatcaatcaatcaatcaatcacacatccatgtgcatatagccagattcacatactcaaatacaaacccacttagacacacagcctcacctccacacagagccttctcccagcacacactgcagataccagaataatacacaaagacacttgcaaatacacccagtacagctacgcaaggacactcatagacacaaatagtcacactcttgcagaaatatacacactttttttttttttttgagacagggtctcactctgttggccaagctggagtgcagtggcactatctcagcttctgcctccctggttcaagcgattctcccgcctcagcctcccgagtacttgggattacaggcatgcaccattatgcccggctaatttttaaaaattttatttttagtagagacggggttttgctatgttggccaggctactcttgaactcctggcctcaagtgatctgcccgccttggcctcccaaagtgctgggattacactcgtggccaccgctctcggcctgaaatacacacactctcaatgtctctccatactcctgcattgacagaggcatcaataacagcctcatacaacacaccagtacgttcagatgcacagagatagacatactcacagcactccaaaaacacacacacagccgggcacggtggctgccgcctgtaatcccagcactttgggaggctgaggcgggtgatcacctgaggtcaggagtttgagactagcctggctaacatggtgaaaccccaactctactaaaaatacaaaaattagccgggagtggtggcgcaaccccgtaatcccagctactcgggaggctgaggcaggagaatcgcttgagcctgggaggcggaggttgcagtgagtcgagatcgcgccactgcactccagcctgggagacagagtgagtgagaccctgtctcaaaaacaaaaacaaaaacaaaaacaaaaaacagacacacactcatcacttccatccatcctcaggatacagacatctatataatacatatccttgtacacacaacaaattaaacacacacttacacgtgcccagatacataccccacacacacacacccctagacaccccccaatacacttggtcaccacccaaatgtattcagagatacacagatacgaagacactcatattcttgtgccttcactaacataatcagaaacaggtgcacccaaccactctctgcctgagggccggcgtttattgcaagcacttgcaggagctcctacgcctaagggtagacactggggctggcacacacagagggtccctaatcctttccagtaagctaggcgcgcgcgcacacactcacacacgcgcgcgcgcacacatacacactcagtcctccgcaagctccctccaccatcgccgcagtccaggccgcccccctccgccccgcccctgctgctccgtgcacactgcagtgaggggcccgggcggggcgcaggggcgcgccagggtccgggtccgggttcgggggcggggcgcacctgggctcctccccggggcgggcccgacgcagcgtcgccagcgcaagcggccgcacctggctcagcagcggcggcggcggcggcggcggcagcggcggtagcagcagcgggcccggctggggcgcgagcgcggcgcagcccagcccagcccagtccgagcgcggacccggcgcccgcagccccggcgccgccatggtggaggcggcgccccccgggcccgggccgctgcggaggacctttctagtgcccgagatcaagtcgctggaccagtacgatttctcgcgggccaaggcggcggccagcctggcgtgggtgctgcgggccgcgttcgggggcgcaggtaccggggctcgggggaccggggtcgggggcggcgggccgggcgcggcaggtgctgggggggggcggggcgccgggccgggaaggcagggggccgtgggaacaatagcgccggccgccgggggtccccgggctcgggcccctgccgcgccggggcctccgagcttcctgctcggcccgggcggtggactttgccccgccggctgcgggagcgcggtgggggtggggcccgcggcccagctccgcgcgggggtccccggcgtccaagcctccaggtgagccgggcggggtctgcgggccgggtggggtctccccgtgcggacctctcgttcccgcctcccgcacccccaaggccttcccttgcacgccttcttctcttttacacacatcacgcccctgcgaggatctcctctcggtctcttcccccgccacacaccctggagacccagaccccgacctcgctggggggtctcgagcgctccggtctccaccaccgcacgacccccaggccccaacacacaccccgcgtcggccctggccgcgctgcgggcggcgaccggggagctctgggaaccccctttcgcctccatagccccctccagcgcctggcagctgcgacttatggccccattttactggggaggttggcgagcccagctgaagggaaatgggtagtacaagatcgcctggggtgggccccccgctcctcccggctgcggggccttctcccattagagcagatccttcactccctcccccaggcccgcttgcctgagagcccgagccaccctaatggggaggatgccgtaatcccgggtccccgggattagaggccctggaaacactcagtctcggctttgggcagcttcacaaccccaggccagagctaggagtcagggcctggccagagaagacaggggttaattaaggtctgggctttccagcggggagctgtgggggtacatccttttctcccactggttctgcccactggtgttggcacagcccatcccccctctccctggccttcccagatcaacctgttctgggtgtgggtctcagtgacagctgtccgtctcctggttccgccccagcctgtccctctttctcccagacagtctctgtctgcgtcgttccatgcatgcatttcccactctggggtctacctccctgcagatatttgcttgaggaagaaagagattgggcattggacagccaggacagccccagctcctcacttccaaggttaccaggctgtagagaactcaacgtggagtgtcagaattgaatgtgaagtccagctgcaccagaatgcgaattatcccaattatctgagcttctgtttccccttctataaaagaaggcgttcattcacagacttatctgttttgcgaatgtttgtggggcaggggcacttgctatgtgtagggcactgctccagtgatggagaccccccgttacctctttgcaaggttgctgggaggcgtaaaagctgtagtgaccacagaattcttcgcgtggcacggggcgcgtgatacatgcgaaacggttgctcgctgctggtgtgattggcggtggtatattttgatgaataatattaacgttatccattatcccctggccaggaatcagagtagaaattatcccattttgaagacagcaaagcaaacttctgatgaggggtgttggtgagctcccagtgccctgactcacccagttctgttcttgttgacccagctccctctgctgtgtgacacacggcagtggctgcctctaccgtgagggtcaagttcaatctgttccctgttccactcccctaaaaagaggagaagggctgaaggaaatgggagcagagttctacaagattcatgagctctggggactcttgacggtatgatacctatcaggtgctgggctgggcgctcagggtgtagaggagacggcaggggatggatatggggcagagggggatgggcaggaaaccagatcatagggaagctggccagcggggcctggggaaagaaattcttgaaatcttccagggagggaagagatcccacaggtggaaagatttgagtctggaaggatgcatggaagtttgacacggagaagagatgtgtgggcagtgggcaaaggctcggagtgtggaccagcagggagttctcagagaataagatgcaggtccccggggtggcggtgggagataagggaggctggtcagactgaggaaggcccttcaggcccctggttatggatccaagggtactggggagccacggacagtgttgggaactgacaagatcaggtatgcagtggccccgtgggagtagtgatggctcagaggaagggatagttctggcaactccaaggcacaggtgtgagaaggctgtgcagaaataaaagcagaacacaagcttggagattagataagaaagggttccaagcctggccaacacgatgaatccccgtctctactaaaaatccaaaaattagccgggaatgatggcacacgtctgtagtcccagctacttgggaggctgaggcaggagaattgttgaacctgtgaggcggaggttgcagtgagccgagattgcaccactgcactccagcctgggtgaaagagagagactctgtctcaaaaaacaaagggttccatgttaaacacatttggaaaacaccccatgcagttctttatgccttcagaacagatgtgtgatgtgtgagggaaactcaagttcatgttggacatttttatcctggacaagttatctcagctctccaggccttggttttctcatctgtacaaggggtataataataagtgtcgtaaggattaaatgactggatgcagggaaggtcatggtataaataaatggttgggtgtggtggcatgggcttgtagtcccagctactcaggaggctgaggcaggaggattgcctgagcccaggagttccagggtacagtcagctatgatcacgccactgcactccagcctgggcaacagagtgagatcctgtctcaatcagccttccatccatccatccacccatccatctacccactcatccatccatccacccacccattcattcatccatccatccacccacccacctacccactgcactcatccatccacccacccaccccactcatccatccacccaccccactcatccatccacccacgcactcatccatccacccatccatccacccactcatccatccatccacccatccatccacccattcattcatccatccatccatccacccacctacccactgcactcatccatccacccacccacccacccaccccactcatccatccacccacgcactcatccatccacccatccatccacccactcatccatccttccacccacccattcattcatccatccatccatccatccatccatccatccacccacccacctactcaccgcactcatccatccacccaccccactcatccatccacccacccacccaccccactcatccatccacccaccccactcatccatccacccacgcactcatccacccacacactcatccatccacccaccccactcatccatccaaccacgcactcatccatccacccactcatccacccgcccatccatccacccgcccatccatccacccacccacccacccatccacccacccacctacccacccacacactctcccacccacccatccacctatccacccatccatccacccacccatccacccatccatccatccacccacccaccaactcatccacctacccacccacccactcatccacccacccacccatccacccatccatccacccgcccactcatccatccacccgcccactcatccatccacccgcccactcatccatccacccgcccatccatccatccacccacccatccatccacctacccacactcccacccagccatccacccacccaccctcccacccatccacccacccaccctcccacccatccacccacccacccatctacccatccgtccgtccatccacccacccacccatctatccttccacccacccacccacccactcatccatccacccatccacccacccactcatccatccacccacccacccactctcccaccctcgcacccacccaccaactcatccacccacccacccactcatccacccacccacccatccacccatccgtccacccgcccactcatccatgcacccgccgactcatccatccacccgcccatccatccatccacccacccacccaccccctcatccatccacccaccctcccaccgtcccacccatccacctatccacccatccacccacccactcgtctacccatccatccatccacccacccaccccccatccatccacccacacacccacccactcatccatccaccaacccacccactcatccactcatccatccacccacccacttatccatccacccacccactcatccactcatccatccacccacccactcatccatccacccacccatccacccacccttccatccacccatccatccacccacccacccatcctcccacccttccacccacccacccatccacttatccacccatccacccacccacccatctacccatccatctatctgtccatccacctacccattcatccatccatccatccacccacccattcatccatttatccatccatccatccatccacccacccattcatccatttatccatccatccatccattcacccacccattcatccatttatccatccatccatccatccatcctagctatgttgtagacctgtgctattcaatatggtggccaccagccagatgtggctactgagtcacttgaaatgtggttgatcagaaccaagatgtgctgtaaatgtaaaatatactcagggttccaaagacttggtccaaaaacaaacaacaaaaaccagtgtaaaatatcttatgaataatatttttatgttgattacatgttaaaataagagtgggatatgtcttgggtcaatgaaatatattactaaattcttattgtttctacatatgtaatgtggcttctaggaaacttgacggctcattgggctcacattatacgcattatatttcttttttttttctttttgagacagcatcttgctctgtggcccaggctggagtgccggggcacaatctcggctcaccacagcctccgtctcctgggttcaagtgattctcgtgcctcagcctcctgagtagctgggattacagacatgcgccaccacgcccagctaatttttgtatttttagtagaggtggggtttcaccatgttggccagtctgggcacattgtatttctatcagacagcagtgttctgctgtaaataatgctcagtaaacattttagccaggtgtggtagcacatgcctgtagtcccagctactcaggaggctgaggtgggagggtcccttgaactcaggagttcaagaccagcctgagcaacatagtgagaccccatctctaaaataaaataaaataaaataaaataaaataaaataaaataaatgaataaataaaataaaaagaaagtggggccaggtgtggtggctcatgcctgtaatcccagcactttgggaggctaaggtgggtgggttgcttgaggtcagggtttgagaccagcctggtcaacgtggtgaaaccccatctctactaaaaatacaaaaagtagccgggcatggtggtgcacgcctgtagtcccagctacttgggaggctgaagcaggagaatagcttgaacttgggaagcagaggtcgcagtgagccgagatggcaccactgcactccagcctgggtgacagagcaagattgtctcaaaaaaaaaaggaaagaaaaatagaataagtttatagtataaggcagtggttctcaactggtgatgattttgacacttaattgacatttggcagtgtctggggacatttgtggttgtcattacttgggaggaatgtactactgacgtctagtaaatacagaccagagattttgctaaacatctcacagtgtacaggacaggacagcatcccctgaatacaaagaattttccagccccaagtaccaatgaaccaaggtggaagaacatcggtgtataataagtgtctgataaatgtcagtgtagccctagcttaaggttttggtgttttttgtttcttgtttttcatcttaaaggccctgaaaagtcctgtaggaaagaaacacgtgtgattttgctggtgggagcaagacgtgcccaaggccggggctggggaggtagagaggagggtttggatttgggagatatcaggaagttgaaagccaaggacgcattaaatgtggggtgagggcgtaaagaaagggagggagggtgatttctcactgccttgggggcagggaggaggggaggtgtgggtgagatgttgagaattgtgggagatgcccagggtgcagtggggcccgtggcagccgctgttgcagtcttcaggtggccctggaagccgtcacggggtagggtggcctggggtgggggtggggcatgtccatttacaaggagacgcctgtgggaggaaggtttctggaagaaggaggcactgggcacagagcccaggcgagatacgggcccacagatatgctttggaggtccctgctggccttggggagaccggaagccatgagggcagcatcgagctcagggaaattgagggagaggtggaggggggctgggagggcagggaggaagtgagcctgaaatacctcttctttcaaggagccaagatgagaggggcaaaaagaaggtccaagtctacatgcgggtggcgcgttaagtgggacggtccagtgtggttttagaaggtgggaaaggagccaggacagggagggacagaaggcagccaagagtgcctgggtcctcacaggtggagaagtcccgttcaaatatgttctgaagcactagaaccccttaccctgttctttcttttctttttttttctttctttcttttttttttttttaagacagaggcttgctctatcacccaggctggagtgcagtggcgcaatctcagctggctgcaacctctgcctcccagatttaagcgattctccggcctcggcttcccgagtagctgggattataggcgtgtgccaccatgcccagctcatttttgtatttttagtagagatggggtttcaccatgttgacaaggctggtcttgaactcctgaccttaaaagatctgcctaccttgttttcccaaagtgctgggattacaggcatgagtcactgcacccggcccccaccccgttctttcaaacacacacacagaaccccaatatacaaaacaagtctgggcacagtggcttacccctataatcccagcactttgggaagccaaggcaggtggatcacttgaggccaggaaattcgaaaccagcctgagcaacatggtgaggcttccatctttataaaaaaatttaaaaattggctgggtgtggtggcacgtgcctgcggtcccagctactcaggaggctgaggcagggaggatcccttgagcccagagttcaggttgcagtgagccatgatcgtgccactgcactccagcaaaaactcaaacaaacagagaaggctgtgcaggctgggcgtggtggctcacgcctgtaatcccagcactttgggaggccaaggtgagcagatcgcttgaggtcaggagttcaagaccagcctggccaaaatggtgataaccctgtttctacaacatacaaaaattagccgggtatggcagcatcgcacctgtaatcccagctacttgggagtctgaggcaggagaatcattcgagcccgggaggcagaggttgcagtgagccaagattgcaccactgccctccagcctgggcgacagagagactcttatctccaaaaaaccgcaaaagctgtgcagattagaacaagagctggacagattccctgctgttgatttcagtcacctcttccccgacccctgccaagccttcctggccttctcctctccactcttggtcctacgtggatttctgcccccagcccactgtccacctggggcttcctcacgcctcttcccattgtcctatttagggacctcaggctgtctctatgatgtgacctcaccatctctctaagccccagcctttcacataatctgcctcaaggatgtcctcaaagcccctcacattcaatttcaccccttcacctcccattcctcctgcacccaagctcagtcattacccctctcttccctcttccccctcagacccagcaaggtcctggctacctccctctctgtcccttgcctcctcccttcaatcaccaggtttacatcactcaactccctcgatgtgcctgtggtgtgcccacctcccctgctcgcctgtgtgccccccactcatccccccctgcctgcaagctaagagagggcgtccagtttgctgggtctaaccccagtcctggtgttgaagagttatttggcctggggcaagggactttccttctctgtgcctcagtttcctcctctgtaacatgggggttgccaattgggccctggctgcctcctagcgttgatgtaaggctcagtgagtctacattggcaagagcaggaaggctcttaggattgccgatgttattgtctttcctgggacctacaagagccagtccagctggcctggtattgggggtagcctcccctcctttccactctaagtgcccatcagctccctgaggcaccgtgttctctcccacctgctgggctttgcatctgcaggcccctctgcctacaacgccatcaccccttcctccagcaaactcctgcacatctgcactctcagcccagatcccctttctcctttcccaatgccatcctccctggtccagacacactcttaatccgggccatgtggtgtgtgtgtgtgtgtgtgtgtgtgtgtgttgtatctggtgaccctgacccccgtgtttcccctctatgcccccacagagcacgtgcccccggagctgtgggagcccttctataccgaccagtacgcgcaggagcatgtgaagcccccggtgacacggctgctgctctcagccgagctctactgcagagcctggcgccaggcactgccacagcttgaaacaccccccaacccctctgcactgctggccctgctggcgcggaggggcacagtgcctgctttgcccgagcgcccggtgcgcgaggccgacctgaggcaccagcccattctcatggtaggccccgccactgcctgttagaccacgcctaccatgctcagctcctcccctcaagctcctcccgccagtcctggctcctcccaagttccctctatcagtcttggctcctttcaagctttgtcgattaagcctagctcctcccatcaggcttggctcctcccccaggttcctcccaccaggcctggctcctcccctcaagcgctattaagcctagttcctcccacgaggtctggctcctcccctcaagcgctatccattaagcctagctcctatcagtcttggctccttcccttaagctatgtccatcaaacctagctcctcctatcatcagtcttggctctgtcccttaagctctgtccatcaaacctagctcctcccaccagtccaggctcctcccctcaagctctgttcattaagcctagctcttccccccagccctggctcctcccctcaagctcttcccatcaagcctggcccctcccatcaaacccagctccccaaaaaggcgctactctggcccttgaggatttgtgtacacagcccaccctatcctaacgcctagcatctgacctcaaagtcccacccatcgtgcgtggcttttccgggaccccatttcttgttccttcccttaaggccccacccatgaaccactggccccgccccctcaagccccaccccccccgtcaagtccctcccatctgcaggttcttccttttcccaggcccttgggggccgaggtgcgcctcctgcagctctcaggtctcaccctctagcgcttgcccccacagggagcccacctagctgtcattgatgccctcatggctgcctttgccttcgagtggacaaagaccctgccaggtcccttggccctgaccagcttggagcacaagctgcttttctgggtggacacggtaggtggggttgggcctggggtgggttcggggaccagcatcgtccagtggccagaccactgaccccctccctgccctccagaccgtccggcggctgcaggagaagaccgagcaggaagcggcccagcgagcctctccagcagcccctgcagacggggcggccccggcgcagccctcggtgaggccagggcatagaaccgtcagaaggatgggggaccggagatctgggagggcagggctgtgcttcctggacactcctgaagtggggagggggctagaggtgacacactctctctttcttcccccctctctcaatctctctgtgccctgcccgtcccctgtgccggtacccgctgccctcctctctgcctctctggcctcagtgccctacgcgctggtactggaagctggttcctgtaagtggggctgtctgtccgccccgtctgcctgccctgcttgtagctctgtctgtctgtatgtctgtttctgcctgcctgtctgcgcgccctctcatacctccccaagctgtgagcaaaggaggttggaccccagtcctgggagacagggagaacccctctgtgaaccaagagaagggtagaatctcggccattaactgagagggcagacccctcccccagcgaactgatgggtggggacgaacttcccctcccgttattcagaagggcaagccctccccgttcccattaatgaagagggtgggaccccctgaacctgtcccccttagccgaggtggggagaccacataaatttctgaaggggggacctgcagcccatcacaaacgtggatcctgaccctagcaggcagggcaccctctggccaaggggaagaccctccaatgcagaagaagatagaataactttcctaactgagacccccagcttccctagagaaaaatcccagctttgaaaaggaggaggaggcccatccctgaagctggaagttgaaatttctctcttccctgaatgagctgtgtgaccttgcagaagtatctaaacctctctgtgcttcatataaattactcccatagtagataaacaaggaggaagtgggggaggttttgggctggctggcgtccccacctttgctcactccttcccccaccctggggcctgggttgggaggttcccttcctgcctacccgcttcctctgcatcctctccccaagctgggggcctgggtcttttgtgggaggaggattccccgcataagagggggttcctactctgtggggtcccttggggctgggaggagctggggttcgcgaagccggccagagcagtcagggagctggacggccggggctcaggaccagggtcagggctaccccctcccccccaaggtgggcttgggggcccagcaggtcagcacccctcccccttgctgatggctgctcctctccccccagcacgcaattgccttctgtttgaaggagtcggggagcaaaccccccatggtaatgtatcccccgccccggggtcccaggagtccctgtccccagcccccgctgctggcctggctgctcgaagacatctcctctgcctcttgctgctgcccctcccctgctccaggctggccccccaactctgtctctgggacccccagcttcccgccccctcatggcggaaaccccaggcctccctgcccagcctgcatgaccgctgaccctgggggccagcctggccactcacctgacctggctcccatctgcagatccgataccgcaaggaccgtgtggtggcgcgacgtgccccctgcttcccgacggtgaccagcctccaggacctggccagtggggccgcgctggccgccaccatccactgctattgtccccagctgcttcgacttgagggtgagtaaatggatgtggaacagatcttgtgccggggagctgggcatcctaagtcccagcccctagaccctccatccccaggtccgcgagaccagcaacgatgcagtggtcatgagggcagcttccggaactggcaggcctgagtttgtgtctctctcttccccaatgagctttgtgacctcacacaagtatataaacctctctgtgcttccaggagttcattcctgcagcagatgaaacgtatggagtgtggactgtgtgccagaccttgttttaggcactggggatccagccagaatagagacacactccccacttcacagacggctctagctgggagagaaagatactaagtttatccaaaagtacttttttttttttttttttgagacgggagtcttgctctgttgcccaggctggagtgtaatggcatgatctcggctcactgcaacctccacctcccaggttcaagccattctcctgcctcagcctcctgagtagctgggactacagccacacgccaccacgcctggctaatttttgtatttttagtagagacgggtttcaccgtgttggccaggctggtgtcgaattcctgacctcaagtgatctgcctaccttggcctccctaagtgctgggattgcaagtgtgaaccactgcacccggcccagaagtactttttgcatactgggtagtcctaaaggcaatgggtggtcagaaaaagctttttttaaaaaaactcttttttcttttttattaaaaaaaaaattatagggctgggtgtggtggctcacgcctgtaatcccagcagtttgggaggccgaggcgggtggatcacgaggtcacgagttcaagaccagcctggccaggatggtgaaaccgtctctactaaaaatacagaaattagccgggtgcggtggcgggcgcctgtaatcccagctacacaggaggctgaggcaggagaatcgcttgaacccaggaagtggaggttgcagtgagtcaagaccatgccattgcactctagcctgggcaacagagcgagactccatctcaaaaaaaaaaaaaaaaaagtataaaatagagatggggtcttgctatgttgcccaagctggtcttgaatccctgggctcaaacatcctcccacctcagcctccccaagtgctaagattacaggtgtgagccaccacacctggcccggaaaagctttttgagctgaggtcttgggggagagtgttctagaaagatgcaaaggcctaaggcaatagtcaccaactttttggctccagggaccggttttgtggaagacaatttttccacagatggaggcagggaggtggtcttgggataattcaagcacgttaatctttattatgtactttatatctaatacgttgtaacatagaatgaaataattctacaactcatcatcatggggaaccagtgggagccctgagcttgttcctgcaactagacggtcccagctgggggtgatgagagacagtgacagatcatcaggcattcgattttcataaggagggtgcaacctagatccctcacacgccaggttcacaatagggttcgcgctcctgtaagaatcgaatgccgccgctgatctgacggaagcggggttcgggtggtcctgcaagtgacggggagcggctgtaaatacactcactgcagctcacctgctgtacggttcagttcctgacaggccacgccccgggggttaaggacccccggcctaaggacggtctatcatataattcacctcggccgggtacagtggctcacgcctgtaatcccagcactttgggtggctgaggcggccggatcatgaagtcaggagatcgagaccatcctggctaacacggtgaaaccccatctctactaaaaccacaaaaaattagcctggtgttgtggcacactcctgtaatcccagctactcaggaggctgaggtgggagaatcacttgaacccgggaggcagaggttgcagtgagctgggattgcgccactgcactacagcctgggtgacagagcgagactccatctcaaaaaaaaaaaaaaaagaattcacctctcgaagggcacctggcagaagctgggctcataggaggtcttccgtgtgtgggggactgctggtccctggcttccctggggccccatcctcctcctcatagagttggggacccactcctcctgtccccacagaggtgtgcttgaaggaccccatgtctgtggcggacagcctgtacaacctccagctcgtgcaggatttctgtgcctctcgccttcctcgtggctgccccctgtcccttgaggacttgctgtacgtcccaccgccactcaaggtaaggccatcctggggcctcctgggccgaggcgggcatctggggccaggggtcccgtctgctgacccggcctcccacctccaggtcaacttggtggtgatgctggccgagttgttcatgtgttttgaggtgctcaagcccgactttgtgcaagtgaaggacttgcccgatggtcacggtgaggccctgggggcctgggggccgggtcgggggcgggtgggagagccaaacccccgcctgaccctcttctctgtactgcagctgcctccccccggggcactgaggcctccccacctcagaacaacagcggcagtaggtacgctccccacactgggcgagtctctggcattgtgggtgtggggctccatgtctgccttgctgagcactgggacgcagctgggtgatgctgttgtctccccccggggagaggcggaggaggaggtgggggtcctgaggctgaagtacgtctctccgtacagttctcctgtcttcaccttccgccacccgcttctgtcatctggtggcccccagtccccactccgaggatccacaggtgaggagggggtaggtggcttctgtcacgggggacccccccactcacagactgccccagtgggcctcatgttgtctcctcgtgagccttccaatagcctctccatcagatcccccttgggcatcccaaagtgacccccagaatggcctccccagtggccccacagtaccccgtagtgacagtaaatggccccgggtatctgtttctggaaacctctggtctcactagaccacataatgagccatcagtgactcacccaatgaccttgcagaggttgtccccagatgctggctgaccccactcagggttcccagggtccccatagtgaccactcatcgcctcccccaggctccctgaagtcttccccgtccatgtcccatatggaggccctgggcaaggcctggaaccggcagctcaggtgagtagacctcacaggccagggtagggggtggagcaggctagggcgggttggggccgaggctggtcccaggggctgacccctccctccggccgcccagccgtcccctctcccaggctgtgtcattcagcaccccctttggcctggacagcgacgtggatgtcgtcatgggagaccctgtgctcctccgctctgtgagctcggacagcctgggccccccgcgtcccgcgccggccaggacccccacccagccacccccggagcctggtgacctgcccaccatcgaggaagctctgcagatcatccacagtgccgagccccggctcctcccagatggggcggccgacggcagcttctacctccactcccctgaggggccctccaagccatccctggcctccccctacctgcccgaggggacctccaaaccactgtccgacaggcccaccaaagcaccagtgtacatgccacaccccgagaccccctcgaaaccatctccctgtctggtgggggaggcatcgaaaccgccagccccatccgaggggtccccgaaggcggtggcttcgtccccagcagccaccaactccgaggtgaaaatgaccagctttgcagaacgcaagaaacagctggtgaaggcagaggctgaggccggagcggggtcccccacgtccactccggccccgccggaggccctgagctcggagatgagtgagctcagcgcccggctggaggagaaacgcagagccatcgaggctcagaagcgacggattgaggccatattcgccaagcaccgccagcggctgggcaaaagcgccttcctgcaggtgcagccgcgggaagcctctggggaggcggaagcagaggcggaggaggccgattccggtccagtccctggtggggagcggcccgcaggcgagggccagggtgagccaacctcacggcccaaggcagtgaccttctcgccagacctgggcccggtgccccacgaggggctgggggaatacaatcgagcggtcagcaagctgagtgccgccttgagctcgctgcagcgggacatgcagaggctcacggaccagcagcagcggctcctggccccgcccgaggcccccggatccgccccaccacctgctgcgtgggtcatccctggccccacgacggggcccaaagctgcatcccccagccccgcccggcgagtcccggccacccggcgcagccctgggcccgggcccagccagtcaccccgcagcccgaaacacacgcggccagcggagctgcggctggcacccttgaccagggtgcttacgccaccccacgacgtagacagcctcccccacctgcgcaagttctcgccgagccaggtgcccgtgcagacgcgctcttccatcctcctggcggaggagacgccccccgaggagccagccgcccggccgggcctcatcgagatcccgctgggcagcctggcagatcccgccgccgaggacgagggagacgggagccccgctggtgctgaggattccttggaggaggaggcgtcttcggagggggagccccgggtggggctggggttcttctacaaggtgagtccccgagcaggtggctggagggtcctgggcctggggcgggggcgggtgggggcggggggaggtggacaaacccactattggatgaatagggctttactgaaggatgggtgggcgggtgggggatagatggggagccaggtatgaatggacagaacaggtgtgagtggctgggtaaggcctccatgggtgggagaggggggaaagggacatttgcacggtggggggcaggtatgtggggtgacaggggcctcagatgggatttgaccctgtctgttgggtaaggacttccacaaggggctgtgggggtgcagtggggtgagaggtcctccccctgtggcttaatgagtgaggccctcgggtatgtttgggggtgaggggtttccagtgggggctgacccagtcatgtccctcccaaacaaggtatgggtggccggacaagggggatagatagatgtggggaggggtggagaaacagggaggagtcatggatagacagatggatgaatggctggttgcatgggtgggtgggtgatggacagatagacggacaggaccaggatcttcagcgcacctccttgctcatcctctccttcaccccctcgcccccagcacgctcctaccacccctttcctggccctgccctgtgtccactgtctctccattcccatggctttcccagccggggacacctagggttacctgactggcctctgctgcctgcctccatcccgggccattttgcactgagtggtcggggattttgactgctccccttacccttgcttttagaatgaaagtcctccccagggtggccgggcgcagtggctcatgcctgtaatcccagcactttgggaggccaaggcaggcggatcatgaggtcaggagatcgagaccatcctggctaacatggtgaaactccgtctctactaaaaatacaaaaaattagctggcgtggtggcgggcgcatgtagtcccagctactcaggaggctgaggcaggagaatggcgtgaacccaggaggtggagcttgcagtgggcctagatcgtgccactgcactccagcctgggcaacagagcgagactccatctcaaaaaaaaaaaaaaaaaaaaaaaagtgagcacagcccaaagccctggggaggacttccttttcattttttttttttgttttgttttcttttgttttttgttttttgagacagagtctcgctctgtggcccaggctggagtgcagtggcatgatctcggttcactgcaacctccacctcctgggtttaagtgattctcttgtctcaccctcctgagtagctgggactacaagagcatgccaccacgcccagctgatttttgcatttttagtagagacagggtttctccaggctggtctcgaacccctgacctcaagtgatccacctgccttggcctcccaaactgctgggattacaggtgtgagccaccgcgtctggcctgtactcacttctgacttagtcctgcgccactgtcctcagctctgtgtcccagccacactggcccccttgtacttccgtgccccccagtaggtttgctccagcctcagggcctcggcactagctgtcccctctgcctggaacgctctgctctgtacgcccacctagttaaatcctgatcattctacagggtacttcctctgggaagccttcctgggtgtctccaggccaggccggggtcctcccgcagtgtagagtgtctgtgcccaacacgagcttttgctggcactcactgctgtctgctgcttttgtcttccccgttgggttaagcagtgtgtgtgtgagcggcacccagtgtatcccatccctgttgtgtcccagtacttagtgtggggctgtgcatacagtaggcaccaactaagtgcatttagaacaatgatgaaaacaaaagcacaggtgggtggcgggcaggctgggtggagggaagatgggcctccagccatgttgggggagggggtggctggctggactcggcgtctgtccccaggatgaagacaagcctgaggacgagatggcccaaaagcgggccagcctgctggagcggcagcagcggcgagcagaggaggcgcggcggcgcaagcagtggcaggaggtggagaaggaacagcggagggaggaggccgcgaggtgaggccgggcctgcccgggacgcccgctccttggcctgtctgccaccgcggaccccgtgagcggttctgatgccgattccctgtgatctgcaggctggcccaagaggaggccccgggcccagccccgcttgtgtccgcagtcccgatggcgactccagcccctgctgcccgggctccagccgaggaggaggtgggcccccggaagggggacttcacgcggcaggagtacgagcgccgggcccagctgaagctgatggacgacctcgataaggtgctgcggccccgggctgcggggtccgggggtccaggtcggggcgggcggagggccacccggcctcgctcgggttgctgtgacgactcagccctggcacgaagcccagcccgcggcctgctgggtgaggacccttgggggacggggcctgcccagtgccctttccggggctcactgggtgaggcccccatgggtaaggggggagggggagggagatgtaagcaggggtgccgggagggggcgggtatgtggggtgacagggggcctcaggtggggttggacactgtctcttgggtaaagacttccatagggggccgggcgcggtggctcacgcctgtaatcccagcactttgggaggctgaggcgggcggatcacctgaggtcaggagtttgagaccagcctggccaacatggtgaaagcccatctctattaaaaatacaaaaattagccgggcatatggcatgcctgtagtcccagctacttgggagactgaggcaggagaatcgcttgagcctgggaggtggaggttgcggtgagccaagattgcaccactgtactccagcctgggcaacagagcgagactccgtctcagaaataagacaaaaaaaaaaaaaaaagacttccatagggatgtggggtgcagtgggatgaggggtctttcttctgtggcttcatggataggaacctttgggagtatgtttggggtgaggcgttgccagtaggggctgacccagtgctgctccccacttgcctgctgggcaaagcatcctccctcatagaggggtccccccataggggtgctgcagagggccgaggggtcttgggcaggactgactcctcctgtgttccccccacagcctgctggaccgggtgttgtggagggcaggggcttctggtgggcactgacctgcaatctctgtccccaggctctcggctgagcaaaatctattcccagtccaccctgtcactgtccactgtggccaacgaggcccacaataacctcggggtgaagaggcccacgtctcggtgagtttagcccgcacaggcggggttcgtatgccgggtggcttcccagagcctgggaggtgtgtgggcatctgggtgaacctagagggcggtatggctcgagtttatggatacgccatgaagagatggagggacgcgtgtgggcacgtgtgcatggggcatagtctgtacctggcagacaggactcaagcatgtgcctcagtgcacttgagtgccaggtgttcctgtgggaggaggacagcacggggcactgcatggacttgggagggtgtgcagtgtataccgcctcctctgcagtgtgtgtggcccgccttttttttttttttttttttttttgtttttttgagagggagtcttgctgtgtcgcccaggctggagtgcagtggcgcaatcttggctcacggcaacctccgccccctgggtgcaagtgattctcgtgcctcagcctcctgagtagctggggttacccgtgcctgtagagacggtgtttcaccatgttggccaggctggcctcgaactcccgacctcaagtgatctgcccgctttggcctcccgaagtgctgggattacaggcatgagccacgatgcccagccgtggcccttattttccttggcccctctgcacatagggaagcttcccatctctgaccccacctccatcccatcctgaccccacctccatcccatccttctcccactgcagggctccctccccgtcaggtctcatgtccccaagccgcctgcctggaagccgcgaacgggactgggaaaatggcagcaatgcctcctccccagcgtcagtgcccgagtacacaggtaagcaggggctctgggtgatgtgaggagcaacaggcaccctcctccacagcccctgctcattcctgctgccccccaccccctcccactgcctcaccctctaggtccacggctgtacaaagaacccagcgccaagtccaacaagttcatcatccacaatgccctatcacactgctgcctggcgggcaaggtgaacgaaccgcagaagaatcgcattctggaggtgagcccgcccacacgtgggagttgggggctggtgggtgggtgggtggcctgacttggccagctgaccatttccagcactcctgcccaggaaattgagaaaagcaaggccaaccacttcctgatcctctttcgcgactcgagctgccagttccgggcgctctacacgctgtcgggggagacagaggagctgtcgcggctggcagggtatgggccccggaccgtcacgcccgccatggtggaaggcatctacaagtacaactcggaccgcaagcgcttcacccagatccccgccaagaccatgtccatgagcgtcgatgccttcaccatccagggacacctctggcagggcaagaaacccaccactcccaagaagggcggcggcacccccaaatagccccacccgggcggtccacgggccgggccctgtgtgctgcggccgccatcccctggaggacagtcagtcggtattcctgggtcctgtctgtccccaaccgtgtctgggtggggctggagtctccaccctctgactttgagtccagtcctgctgtgggggctgagctgggaggttcagggactcagggctcagctcagtccccttgtctgtcctcccccacttcttgaataaaataatttaaagagaagttgaaccttgtccccccctccgaggctggccggggtcccacactccctggctgtgtttttagtctcctgttctttctcaaaccaactcctgtcttcaacccccataatcccctaatgcagcttcagccagggcactcccagcccccagccagggctgtttcgaagctgcctctgaactgatctctcaggctcgaggtgtcccactggcccttcctgtggccttggccacccccgcttgctggattctcctggtctgtgtggctgttgttactggccctaaccagcgtttggcatggggccaacttctaacttgatcttgtctcccctggccagcctggtgtttccaggcctggcatctacctctgggccagtgattccaggtttctctgagatctgtgtttgacaatccagttgccccctgccattgcctgggtgtctctctcagatgcaaggcctgccctgcaacccaggctggcactggcttcccagctgccgcccagttctacacagctcagccctcccctcctgtctcactcgcttctctccagccctgtcacctccctgcaaagtccaagccaatggcctgggcctccccatgtccccagctgcctcctgcccacacagcagcctgtgtgacccgttcgaagcacaaatctgattatatcccttgatacttaaaaccccttaatagcctacagcccgctaatggcttcccaggcttaggactaaggaccacgccctggtcctgggccgtgcacaaggtctggcgcctggcccccgtccaggcacagaaacgcgttactaatcagttcccagagctgggccagagcctgcctgactccaagacttgagggcaagggccagtccctagtggggaacagacagtgggtgccaccccagggaggcggcagctgcctggggccacagaagggctctgagaggcaggggctggcgagacctgggcagccaggggctggattgcccttcccaggctacagaggctcaaggaagtttccgggcaggacccactccaaggccccaggcagcggagggactggcctctcgagtccagaactggctctgcggggtgaggccgggcagtatctggcctggggcccagccgccccacctcccacagcagccaatcccggcccagggccaggcactcctgagctgtactccctcgggcacctgggcagcaggaaggaggctcagaccatgatgtacaaacgtagctgtattggggagggggtggggaggggggatgggggagggacgggtcagtcttccttcaggctcccaaacactgcggctggcacgctctgctgctccagccgaacctctgtggggaaggcgggagccagtcaccctcctggcgttggcctgtcccccgaggcccaccctggtaatgccaccgtccccgccccagccgggccctcaccgttgggctccaggtccatctcgtcctcgtcctcgtcctcgcccagctggatctcctcggggttgacctgctgtgccagctctgccagctcctcccgggaggcgtcactcctagggacgggccatgctgcctcagttccccaccccgggcccccttgggacctgtcccagtcctgtcccgtccaaggatccgccctcacctcacgaacaggatcttgctctgggcgcgcaagggctggtcacgctccgcctcagccgccagctgctctgcccgctgttccagcagcttcatgtcgtccatgccactctgcccaggggccaggtcagacactagggggtgggagcagggggtcagcgccacgggggcccctcccacacatcggacgttgcactatcccagtcccccaggtgatggcccagccctcaaggagattgccatcaggatccgaggctcccagacccggaaagcccaggtcaggccgggctgagatgccctggatcaggaactcagccagctgggacggctcaccggtgcccgtggcactgcccgagaccttgagcatctgcgaggccatgaagttgacctgcgtgttgtacgtggcctgcacgctgcgccggatacgcagcatttccttgatggtgtcctcattgccatgccggacctcaaagtccttccacgtctgccagaacgcgccggtcgtctgcgtggggggcagggcaggggtgggtgtgtgtgcccgtgagctggctgactccgccgcagcccccaaccctgatacccgtccctccccacagccctacccgggggtcacagatctgggagcagaagctgtagatggcccgggcgcggtcaatctccccgagcttgcactccatgtctgcaaaccgcaggcacatctcacgcgcgtgctcgtccgacagcacctggacaccggggttggggaggccgggagtgaggccggggtagctcgggggctcccaacacaccatggccatccctgtgcttccagaaggctcctcctcagcccctcccacctgcctggaccccttccgtctgctcagggacctctggccccggcccagccccccacggtgggtacctcaatggccttctggtagatgccgcgggtgtgggtgaccccatagatctcggccgcccgcttgatgtagatgttgaacatgtcatactgctgggcgggctccacggccctggtggcacgctcgtacacggccatggcatgccgggccaggccccactcctcctccagctgtgcgtacagcaggtacaaggctgggcggggtaggcggggagaggggagcacggtcagccggggccagtcagaaacccagcccgcccgccaccccccccatgccctctgcccgcctcactcttggcatattttggggggcagccgtccagagcctgttcaaacaggtcccgtgcccgctccagcttgcggcccccatagcgggcaatgaatttggtcaggtaggtgctccagatgtcggacacgttgggccacttgaacagcgagatgccgcgctcgtacgcctgttaccagagggagagtcacatgtgagagtctgcagatagagaccaccaggcacccgggatgtccttgggtggcgtctgtagggagcctgccaggaactcccttggggcccttccctgtccacgcctccctgtccctaatggcagttgtgggggtctgtcctctgcactgtctccctctgtgagaaccccaagaacaggggtgcaatgggacctgctaagcacagtctggccccataggaggtgacatgatgggtgaaggtgggtggctccccagctccgctgacgctggctgcctgtccccagggagaaggccgcaccccctgacagaggggcaggcagtagcacgcgtatgcatgtacgacctccccatttgtgtatctgtataatgcccacacgatccatagaaacacacactcaaacatgactgctccggccgcgggacatggccttcccacggacacgcaacccaccccctggaccccacaacccgtctcctgagcagcggggcagggagagcccgcacacactggcaccaacaccctccccatgagtcatgggtgcacgtggaagtaggattctgtgcctgctatggaatgaactgtgcccccctcaaaacattcatatgctcaaatcttaacccccagtacctcagaaagtagattcgtttgaagatgagatcactaagttaaactgaggtcgttaggggccacctaatccattatgactgatgtcctttataagaagaggaaatttcaaaagtgacacacacaaagagaaggccacacaaagacatagggagaaggcggctgtctgtaagctaaggagagaggcctcaggaggaaccagccctgcccatgcctcgatcctggacttccagcctccaggacggggagaagctaaatctttgttgtttaagtcacccagtctgtatactgtgtcacacaagccccagcagattcgtaagttgctgaggacccctggggaggggacactgccatcaggggcctctgggtccaccctagcccctcaccttgaagctctcctcgaagtacttgtgctcctccaggaacatggcatagttgatgacgatctggggtgttgcgatacgcaggtccaggatgcggtcgtacacggccttggtggactgcaggggtggggatgggaaaggttggagctggttctggagctgagtccggggccccgtccctccccagccacaggcagctcacctggaaggtgccgaggctctcctccaggtcggcgagcatggaccagaccttcagtgacttgtacacgcggttctgcacgggctctgaaccatcaaagtactcggcccggcgggcaggcagcgccgtggccttctgcaggggcagacagtggccggggaggcgctcaggggctgtccctggcccttgccctacaacctgcagcccccaccccacagcctgggcctgttctcactcgcagcagccgcaaggcctcatcgtagttctcgtgtcggagctccagctctccgcactgacaccacacgcttgccaggtcatccacctgcttgaagttcaccttggtggccttctccaggatgacacgggcctgccggggcgggcagaggcgaggctgagaccctgcccacctggacagctcccaccatcaagggtcagaaaggtgaccatgctcacaaacatacaggcacaaacacacaggcacacacacaggcacacacatgcgtgcacatatgcatgcacccaaatgcacatgcacacacacgtgcacacatccatgcacaaatatgtacacacacatacatgcacacatatacaagcacacacacatgcatgaacacacaggcacacgcaacagggtgctcacatcgtccagctgtccgttgtcctcataaaacttggcaaacgccacccacagagtgtggggcttgcctgtggccttgaaggggtccaccgtctgcacagcctctgtgtaggtgttgatgatctggggacaggagggaggaggtcatataggactcaggaccctgcagatgacggtcggggcagagctgtggctctgaggggtggggcctggagggtgctgtggcccctgtcgggagaggccagaaacgaactatggcccttgacaatggtcaggaccaagagagagctgtggccctaaggggcggggccaggagagagctgtgaccctccaaggggcggggccacgagggagctgtggccctccaaggggtggggccaggagggactgtggctctgaggggcggggctcgggcaggaggagaaccccaagaacaggggtggaattggacctactaagcaaagtcaggcccctagaaggtgacattatgggtgaaggtgggtggctccccagttctgcaggaaactggccctcaggggtaggactggggcaggcttcatgtacctcccgggggcggccctggtgcagggcgacacgcttgtgccactcgtgcacgtggtgtgggttttggcgcagcaagacgctgttgaggagcaggggccgccggctgatgagctgctcgaagcgggccaggcgcagctccaggtccacatcatctgggagccgcgaacatgtttgtcaggggcggagacccaggatgcaggtccccggatgccaccgcctccactccccaccctcactccgctccagcccccagccaagtgctctgggccctagacactcagctcgggtgtccacctgagccccacccccagccccaggtactgtggataccccctcctacccccactgttcccctagccctcctgccctgccaggctctggcccaggcctgagaagtgtccccattcctggctccttcaagacccccacaccccctgcatccactcagcctccttccctgctggcccccagctgagcctcccagggctgcctcacctgagatgtgtcccgcccctaccgctaatgtccactcagctctctccccaccagccggggcccccagaggctcaccctcctcctcgcgccccagctccgaggcggtctccatctttgcagcgatcatgctctcctcgaactgggcgtagctgtcaaacacctgtgtgaagtcccgcacggtcatcactgtccggatggcctcctcgtacacgtcccgagcctgtggggacccagggaaggggaggtgagaggaaagtggcgcaggggacaggcagcagcactcttagcaccagcctcaatgtggaacccctgggggccttctgggtagtgacgcatccagcacctctgggtagtgaccccaggacagagcctccgtggagccttctcacccccgccctgccctgcactgccagggtggtcttgggagcttcaggacctcctcagtaaactgggtgactgccctttgcacacagtgacctcagggctcgactgagacacatgtgtgaagcacttggcacccaataggtggccaaaaaccccccagcgcctatgggtccaccctgcagggaccctcgcctcagctcatcctccgaggcctcagaatttgctccaaagcgtccctctcgcttgcctgaccctcttccccagcccgcctgtcctccacctggctcgcccaccccagctcaggtcccctctctctacccagccctgacgggtcttgccctgctgcctccgacagccttggcctacacgtgcccctggaaggggcgctgcgaagcgcataccgcccacaccccactggcggctcccccagccaggagcatggccagcccgtttggctttcgaggctcccaacctatcttccctgggttcctgagcctccccgctctcggctctggccccctctgcacccacctgcccccaggccatcccctgagcttgccactccactgcctgccaagagccacagtcagctaacccctgagggagtggccctcacaccacgtacctcctcagtgctgtgcctgcgtcactgagctgattggtgacaggcagtaactgtcaccctgattttacaaatgaagacaccccaccttagtggggccaaggccgcagagccagagggtgaaccctgaacgcaaatgtggctgactccaaggctgacgtgcctgcgggcaggagtgctcccccaccctcagcaggatagtaatcgtgtgcagggatatgcatgtctgtcaaaaatggcactttttttttttttttttttttttgagatggagtctcgctctgccacccaggctggacttccgtggcgcgatcgcagctcacggcaacctccacctcccaagttcaagcgattctcctgcctcagcctcccgagtagctgggattacaggcgcgcaccaccatgtctgactaatttttgtatttttagtagtgatggggtttcaccatgttggccaggctggtcttgaactgctgacctcaagtgatcctaccgcctcggcctcccaaagtgctgggatgacaggtgtgagccaccacacccagccataaatggcatgttttctgcctgtgcatgtgtcaacatgtgtccccgagtgtcggagggagaccccgccccgaacccagagccccgtgtgccagcatgcaccttctcgaaatggccgctgcggatgtagtagtcggcgagagaacaccagagcttgcccagctggtcggtgaagcgggtgaggcccccgcggatgatggcgtccacattgagggactgtaccttgtccggattctgggagatgaggtcgcacagctcgtgccacagctgcagggcatggggcagtgggggagagtctcaggctcagtcatggagggggtggccctcccacccagttgccggctcccggcaggcccacctggtagttggacttgccggccttagacacgaaacgctcgtcgttcaccacggtggccaggcgctgggcggcctcatccagccggtcacttgacttgaggtactcaatgtactcctctgcactctcaggactcagctggggaccgagccacccctcaggcagtcagtggggtggcagggctacgcccacctcccgattcagtggcttcggggcgtccccccccacccatttatgagtgtcttgggcaaaagcaagccctgtcaaaccagcctcagccccactggtccagcccggttcctactggtctagccttggccccactgggttaggctcaaccccctgtgggtcctgccttggctccactggtccagcctcagtcctgactagaccagctgtggactttttgggttagccttgacccgcaagggcacagccttgactgcggtggtccagtctcagccccaatggtccagccttggtccttttgggttagaattgacccccaacccacaatgggtccagccttggctccactagtccagcctcagtcctgactggtctagccttggcccctttgggtcagccttgatcccatgggtccagccttgactatagtgtccagcctgggccccacgggtccagcctcagtcctgactggtccagcttagaatccaaacgtcataaaacagatactttaagtttgagcaaaccatgccccactcccgcccggctggtgcttccactctccaccctgcctgcttctccccacccctattcctggccctcttcatggctgtggttttactctagttcatgccatcagctcatatgcatctgtcttcctacttagactaaaagctccgtgcaggcagggagtgtcttagtcacactgtcctcagcacccatcgctatgcctaatgtgaaaccagtgtgaacaaactatttggaaaataaagacatgaatcacggacaacaacaaaacacatgcatctccaggagcctcttcccacatcccgtctgctgggtgacatcctacgcggagctagtgtcacagtgaggccgtttctggaaactaacctggggaaccagcgcacctgctaggctcaccttgaggaagcgccgatagcctcgcacagctgtctcaggcagtgggtgtgagcgcaggaagcgcagatacaggggccaaattcgagagtgctgcgtgatgggcagtgcccggagggcacggtcgaaggtgcggcgggtgtgtgtgacgcgcccctggtccatgaggaactggcagtaatctagccacagacgaggcatctgggggtgtggggagaggcggctggggctaagccacggactccatggcctggccacagacactcgatgtcctgtggctgagccacacctggggccaccacataaatgcggcgggacccagaaacccccagctccaggactgagtccagcccaacttcccatgcaaagaagcaacaggaatccaagcccccatccctaacatgctgagcccagcccctgtccccgccccacccaccaccatggactgagctccacttcccgattcatcccctcgccgagccccaaaccttgtgcatgaacacaaaggccctctcatgacagttgttgacatcttcataggcagggtcggtcacacagcgatgcttcacctgtgcccgacgcgccttcaggtatcggtaccagagtttgtagctggggaataggaggggacagatgctgatcggtcagctttatggacacccccagaaccatttgccctgccccagttggcaaatgtgggaagaaggggtgtgggaggggtgacatgtctcagcaatgacagggacagactgggacatcagagaaggtgtgctgacccatcaagggatgtacaggtcagtgatgaaacacgaagcaatcacccgggacccgggacccacttggcagttttgttataactggaccaggtggggtgggggctggtgggcagggcagctggagccattcccacctgcagggcagcagcttgagtgcccgctcgtatagctgattgagcctgggcttcggggcgccctgtttgaactcgatgtagcgaagccagcatttgacagagaattggttccgcatgatttcctcctcataggggaggtcctcttcctcctgccagggccagggaatgggaagaagagaggcctaccctcagagcctgtgtgcagcaccatcccactgctggggctcaggtccaaactccggacttttacctagatcccaccacccaccaaggaagtcaggtcaccagatgcccaggcaccaaaccagatgcccgacaccaagacagtggcccagacctttacccctcagaattcaactacccaaaatcgaacccaaatcatcagacttctcagtcattagggctctgggccaggaatgagtccgcatcaccactcgctttctgccccagatggtcagactccttagataccaaggccctggcccagatgccagtcctggacaccagaccccacttcttcaaaacgtgcctcttcccagacaccaggcctttggcccctcagactcccactgtcaccatctgacccatctccaccccaggcccagatgaccagatctttaccccagccaccagggctctcaggtccagattccaagccactagccccgcccccaggatcccactagccagcgtctagctcaactctgccccagaaattaaaagctaggcctttatctcacaggaggagttatacaccagaagccaagcctttaactctgcacaccaagaatctggtgaagatgtcacgcctctactccagagagtaagtatttcactggccatcgcctgacaagctccacatcaccagggttcttctagcctggccaccaccccagaaactgtcatgctgcagtccaggcctagagaccgctatccagaaaaccaagccttcatcccagaaaccagaaccctggcctcgtaagcaagcctttacttcagacaccgatcttcacctctcaaggttcagttatgcgatcttcctcctctcccattccctgcacgcccccatttccgcccctggttcgggaggctagacgcttcccttcgacagtggttttctactcagacccgaagatacaacaccatatttttactcctggacagttcggtgcggacatgacgatccggtctctggcccattagggttcccagaccttggcctggcagtttcggcctaaatctccttgccgacccagcctcgatcccctgcggcgtccaggtcccaatgccccaacgcaggccacccccggctcctctgtggactcacgaagacaaggtccggccgctcgggccgcgagagtcgcgccatcaccaccatttttctggatgcccaggtacaggagagagtcgcgcgcttatgacgtctaccactgacggcccgcccctccgagccagacccgttttctattggttaaatcatttttgacggacaggcccacgttattgacttcttttcgacgacgccagcgaccggaagcagaatagaggcgccagaagatgcgccatcaggatacacattggccaatcagcttcagcaatggagcgtgcaaaacaccagtgagcttctgtcttgctggagggtcggctttgggcggaactggctttgttgaccgggagaaacgagatgggggtgaagctggagatatttcgggtcagtggacacaggagtgggttgggaggctgggcaggggatcttcctggatctgaagatgaggttggaaatggggggacttcaaaggaagagggagctccaaggagaaagctcttaagatttgagaggaacctttctggttggaaatccaggagaggggacgctgggctgggggggttctcggatttgggcttctgggtttgggggctgtgagagggctggtccgaggaaggacctcagagaggggtgagctgagaagggggctctaaagaaggaagacttaagatcctgggggagctctcgggctcgtggtgggtgggtgtctatgacagggagattcctagacttcgagaagtggagttgaagagtgacgcctcctgggtttgggggtgctcccgggatcttaagtggggatgggtaatgaggtctcgaggagatgcttttgattgtagctggggcgtctgtgtgtctgtctgtgtttgagaggaagactccagctcagagggaactttcaggaatgaggcctcctggattataggagttaggttttagggtgcgaggtttctgtacccttggtgggagttctgggattcttgggtcggccgtaacgaggcgcttctggactctgcagtaggatgggtcccccaggctctgaggagcctctgcacattgcttggggggagctcacctcacccaccctctgccattccagatgataatctacctcactttccctgtggctatgttctgggtttccaatcaggccgagtggtttgaggacgatgtcatacagcgcaaggtgggcataagaggagtgtttgagggttcattccaggggtgggagagggtgtggggcagcagtctgctggggactaatgtctgcctcccataagccgaccctgccctgatgtggggctctggaggcctttggctcgtgtcccatttgtgacttttccttacagagggagctgtggccacctgagaaggtaagtgatctcttcttcctgccagagggatggaggaggctggattcttgtatccgggatgggttttagatgaaaattttaggccaggcgcagtggctcatgcttgtaatcccagggcatgggaggctgaggtgggtagatcacttgaggtcaggagttcaaaaccagcctggccaacatggcgaaaccccatgtctacagaaatacaaaacttagccaggcatggtggcaggcgcctataattccagctgcttgggaggctgagggagaagaatcacttgaacccaggaggtggaggttgcagtgagcccaagatcacgccactgcactccagcctgggcaatagagtgagactttgtctcaaaaagaaacattttactctcagccatgagtaaggaaccgagagcagaggagtagatggtttccttattgccttctcctggaagagtgaagcggatcccacgcggacccctttgtaattggcagggggcttccagtgaagacactgaaccctgaagccgtggtctggggcagggtggtgggagaggtgggcgggggggggtggtcccggctctgaggtgtgtgcccctccccccttcctgtcccacccgcttctccacccctagcttcaagagatagaggaattcaaagagaggttacggaagcggcgggaggagaagctccttcgcgacgcccagcagaactcctgaggcctccaagtgggagtcctagcccctcccctgatgaaatatacatatactcagttccttgttattcatttaagtgttttattcttttatcagtttttgggggccgagtgagacccaggatgcctcaggccctcagggggcttgtgtcgggggctgggggctgctgttccgacggaagccgagagcggtcgggtcctgaggggtgagcaggggttggggactgagggtcccagctcgtttctgtgctccgtcctgtggatgaagaggggtcagccagggggagggctcaagggcagtgccggccacaggtggcgaacaatggagagagggtgcaggtagccaccgtgtcccacctcattgtgagcactggtctatgtttaccctcaatatctgccatttagggtggcatttgagtgtgaggtggcaggtcttggggccctcgctgggatcttgatcagaacccaagcttcgtgtatgtgtgaagtcaacagatgtgagtatacagatgtatatatcctatgtgtgagcttacgtgacttcctccctgggatactttcctaggaaggggtcctattttctccctttggcctccccagaaccttcagacttgggggcaggagccacaagttccagccatgggtcttacactagcatggcccctgtataaccttgggcccctctagccactgcctgggccttggtcctcccatctgaagtcagggcagcggatggacagagatggggcaggccctgttccctcctggctggggtggagggcaggatcggagagcactgcctggcgggtttctcctcgacatcgccagaacatcacctaccttggaccccacgggctggaagccgggcaggctgctgactgtcacacgttggtcatccatgcggcggccctgggtactggccagcatgtccatgaggctgtccatctcgggggtggggtcgctctctgcgtggacgttcacagacttgggaggacacagccggagtgggggcccccaaccctaccccttcacccccacacagatgcttcagggtgcacaaccacctcccacatcccgtgcccccaggccctccagatgaccacttgccctgcactcccaccccgttcacgccccatggacagcacccccgtgcccatgctcacggctcttggtggtctggcccggcccggcttgcagtgaacagcgctgtccctccatccggtcgccctgcacgtggctcagcagattgaagaagccctcctggtctggggagcccgcctggggacagactcgctcagtctggttggcccttcagcttgggggcccctccccaaacttcctagccagcttgctcacaccctgaccccggggcctgccgtccccacttcctcagctctcaccatggtccccgccgatcctctctgcagagctgttctgaatgagacatgagtctccttcccaatcccggcccccgccccaggggccctggccagcagtgccacttcacgtggtaccgcttcaagggacaggctccgatgcgtgtcccgccgtcctagattggggcctgatgagtgtggcctgggagctgggacacgaatcagggaaacatggcccaggagctacccccaggtcccagcatctcccatcaataggggtccacacggagagccctgccctctgccctggggcctggcactcagacccccaagcccaccagcccctttctacagccacaactgggtcagggggtcctaggagactcactcgttaattaggtgccctacaaactagtcttgtcaatcatgggctctgagaccttgagctgggggtggggtgggggcagggccctctcacctcggcacaggggcctgagccttcctccgtcttctcctcctgatccatcatgtccctggactccagtcacttttctgctggcctctgccccggcccagtgccagagagggccttttaaacgtccaggacgtgggggtgtggattccccccatccccaaatccccagctcatgccccatctgctcccacccaagcttaagccccataaagatcatccagataattgtttgcccacaacgatgctggatctggcatggtgggtagggggcagggcgacctgagcttggacctcgctgtgcccagcagcaatgactggaccccagggactctcaggtgtgatgtcacaaaaggcctgagcagcatccccacagttggagaagggaggccaacagtgtagggtggtagctggcttagggaggacttgcaggtgtccccacccagccacccaggttcccccactggctcctgaaagggcagctgccacctgcagtcggtacagaaaaaggaggttggagtcaaaggccccttccctccctccctctctgcacctgcctcagacaccaccggccaccctagctccagctctgtctccttggcagcaagtcaaggggtctcccagccacccttccttcaactcactgtccctggagcctggttgcctgccccagaccccaaaacaagaaagtctggggtctcctgttcccacaccacctaaatgccaggttgagctatctcctctcctctatcaccctagccccaggtgggaacaggaggcgagactccctggggacagaggcaggcggggagaggacgtccctgccttttcccccgagccactgtggctttccctcagtgcccaagcaggggataccactgggaggtccccatccccttcccttccctccccaagacgcctttacggaaaccagtggaagtttcatctcagaatgaatgggctgcactatcaccacctctgcccgagcctcctctgttccacaaaaggccaagttcacactctctccctctatgccaatgaagtgtccccctcctcagtacgtgtatccctttcctaggcctgccagaacaaagtgtcatagaccagatggcttaaaacacataagttgacttttgttatatatttttatatagagatgaggtctcactattttgcccaggctagtctcaaactcctgggttcatgtgatcctcctgcctgggcctcccaaagtgctgggattacaggcatgagccaccatgctgagcctttaaaatttttttttaacaaatttattgagccaacgttccagaggccacagcctgaaatgaaggtgttggcagagctgtgctccctctgaaaaccaggtctcaggagccctccttgcccctccctggcttttggcagtggcctgccgtccttgatgtccttggcttgtcactgcagctcttcactccctgcctccgtggtcacatggcattctccctctgtgtcccagtcttcatatacccatttccccacccccccaaccacctacacagaaccaggcagacatataactatcttacaaggacaccagtgatattgcattaggggcctactctactccagtgtgacctcatgctcactgctaatatctatactaaccccatttcaaataagatcctattgtggggtattggggattagtacttcatatcttttgggggttagtggtggggtggctggccctaacagctctctgtccccccaaggggtcaggctgagaagctggaggcggtcctggcttccatccccccaggatctggagggttccccgccttcccctgctcaaaactcttgagaagacaaaacccaaacacctaggggttgtggaaatgttctaaaatggattgtggtaatggacacacaactccaaaaatactgaaagccattgacttacgcaccttaggtcagcgagttgtatggtatgtgaattatatctcagtaaagctgttacaaaaggaggaaggggcagggtgcggtggctcatacctaaaatcctaacactttgggaggccaaggcaggaggatcccttgagcccaggagtttgataccagcctgggcaacatagggagatcctgtctcttaacaacaacaacaaaatcaaccgggcacggtggcgtgcacctgtagtcccagctacttgggtggccgaagtggaagaatcccttgagctcaggaagtcgaggctgcagtgagctatgatcgtgccactgccctccagcctgagcaacagagcgagacccgtctctttacaaaacaaaaacaaacaaaaatggggaggagggagaagaaggaagaaaggaagggaaaaggaaaggaaaggaagaaatagctcaaactcctacctacggttgccaaccgtcctggtttgcctgtgactgtcctatttttagcactgaaagtcctgcatcctggcactgggatgggtcagtctgaccttgtcctacagaagtctggcccctgctgcccccaccctccagccttcttaagctcggggctcctcccttctctacctggacatgctgtgtggctgcttctagaatccatttagggataatgtcaaaaggctgcttcttcagagaggccctcgggggtcatcctcagtaaagtcccctcccacccctaccttctgtggcacttgttgtcacattagtttatttcctttagggcagcatggatcctttcctatctcccccagaccttcgggtctgattcactccctatgtcccatgtaagtggcagggggcttggtaccttcatcaacacggccgagcgaaggaaccagctcagaccagcaagagtctgtttgcacacatacctcgcaccttaaatcggagacctcattttgtatgggtgctgctggggctgtgccttccaagcgacaggacacacagcagaagcagcttctgaaattccgagtgtgtgtctgtgtttgcaagcatttgagggcgtcactcaccccatgtgtgtatcagcatgttaattcgattgttggtccacgagggtaagcgttgcgcctcccggaagagggtaaggctgtgacaaatgccccctggggacaggctcctggcttgaacccagcaggctcactcgtcgtggccttggattagggatcccgctaagcctcggtttcctcgtcggcaccgcagtccaggtcggaacattgggcaggactgaatgaaaattatgtccaggtgcctgcacacaagaggtctccaggcctcctgaatccatcaaaagttatccaagacggctgctgctgctgctgctgcctctaaaccctgaagtacagaaggcaagtgggtcaagatcccaggcccagacagtggcggcccggtggcatcgagtgggtgccgtgtatcttgcaggcacagaacctcccggggaagatggagggattattgccctgcgatcctgcttcgcacgcaagccaggaagtgtgtgtctgaactcccatctgtgagcgtgtcgtcgaggtgtgcacctccagcgacttcgtgctcggcagcgcggacgcacctgcccgtcctccccgccagggactcaacttcctgggcctgggcgagaaccgacggcggggaggggccaggtgcgcagggggcggggacagggcccgcggggcggggtccacgtgggtgacgcgcggggccacgcccccaccttgggacacacccggaagcggcggcggcgcccctcggggaagatggcgccctcggggctgaaggcggtggtgggggaaagtgagtgcctctccggggccgggctctggcgtccggtgtgggacgggggtcggggacgcacgggctctgggatcctgggtttcatggcggctgggagttgggggccgggctgggcgtccgagcacctgaccctcgagggggcgggcggggacgggttcccagctggacgcccctgctctccggtgccagaacagaacaaaattggggggccggactccggggacccaaaggggacgggtagagtgtggcggaggctggggcccggactcctgggcctcctagggtgcctgccgggggaggagggcacagctggatgcccacactctaggatctcttaagccgggcaaagttcaggggctggattcttggggcctcctagggctctggtcagcgaccctaggtgctgtgagcgctcaggggacgtgtccaggccccacaggggtggtgtaggggatgtcttcctccttgccccatttccaggagcgccttgcagctggaggacgcaggcgtccaggcctcaccggccccggttcttgggggaagggtggagggcgcctcttcctccaccccggggagttccggcctcagctgctccttccgccctggccgtcttgataacagtggacatgacacagtggacgtggctgggcggggccaccccgttacttctctccactctctcctctaggcagggcggtctgtagctcaaacccctttaattgggggagattagaaaaaagtgattccattttacagatgaggaaactgagaccggaggtcagtgggatagcctcagctaggcatgcctcagagctgggaaccaggggtcctacattttagaccaggttggggggactggctgaaaccctcacagcaggaatacttgaggtagcaggtggggaagccgagagcctggcgctagaggcagatagagctgtagatgatcccggttctcctcttttcattcacctaaaacatgtttatcgagtggcaccttttgccccagcactctgccacttagacactcaggatgcgtaggtgagttacatgttgcctaagaatctgtttccctgtctgtaaattgggggtgaccccagaagccaatttgcagaactgggggctaaaaataaatgattcctgtgccgtgtctcacacctgtaatcccagcactttgggaggccgaggcaggaggactgcttgaggccaaaagtttgagaccagcttgggcaacatagcgagaccccatctatacagaaataaaaataaattagctgtgggtggtacatgcacctgtagtcccagctactcgggaggctgaggcaagaggatcgctggagcccaggagttggaggccgcagtgagttatgatcacaccactgcactttagcctaggtgacagagtgagatcctcctctcttaaaaaaaaaaaaaaagtaaatgggaattaagatgggggttcagccccaaggctgagaaggcttggggcagtggtgggaccagagaaccagcattctgacccctcccctcccttccctgcagaaattctgagcggagttattcggagtgtcaagaaggatggggagtggaaggtaggggtgaggcagatggctgggtacccagaggcagctcatcatcaggcctatggggaagaccctgaatgtgggacccccaagaactgcctgtccacatgggtggagttgggtgaatgggttctgggtcctcccacccagccagcccttgaaactgcccctcccactgccttggccccttctggggccagctgtggcctcttccgcctgctcctccatccatctgtccatccatctggacaggtgcttatcatggatcacccaagcatgcgcatcttgtcttcctgctgcaaaatgtcagatatcctggctgagggcatcaccagtgagtgaacgcgtccccagtgagatgggacctgagcgtgggaacccctgactgtgcccctctcccagggttcagcccttgagtgtaggatcccctcaaatcgtccagaactcccaagtacgcagctccctgcacggacagcccggatcatgtgaccaaatccattcttaaaccttgcaagctgactgcgggagcccatggattgcaggcctcccctgcagcactccctggctgcagccccttcctgaccgtgcagctccctcgtggagccctgtgtgggactcccagggtggactctggatgtggggtcccaagaatgcagagccttctatgggtgaccccaggtggtgtcccagtcactttgccattgagggataggtgctgagggagcctgtcctctcagaacctcagtctccctgtctgtaaatttggggaacccagttggctgcacaacccctgcagaaccctgtcgtgtggctcttagctggtggtccctaagtgggtttctcctgcagtccctcctaagcatccacccctcctccccaagcctccaaccccccacacctgagactccccacgtggccctgcctggatgccacccacctgtgtcccttcctctgttcctactagttgttgaagacatcaacaaacggcgggaacccattcccagtctggaggccatttatttgctgagccccacggagaaggtgcctacatgagtgagcgtgtgtgtatgcgcgtgcatgcgtgtacatgtgcatgtgtgtgtatgtctgcatgcatgtgattgcatgtgtgcatgtgtatacgtgtgcatgtgtccatgtgtatgtgtgtgcatgtgtgtgcatgtgtgtgtgcatctgtgtatgcatgtgtgtgcgtgtttgcatgtgtgtctatgtatgtgtctgtgtgcatgtgcatgtgtgtgcgtctgtgtgtgcatttgtgtgtatgtgtgtatgcgtgtgtgtctgtgggtctgtgtgtgcatttgtgtctgtgcatgtgtgtatgcgtgtgtatgtatgtgtgtgtgcatctgtgtgcatctgtatgtgtgtgtgtgcgtctgtctgtgtgcatgtgtgtatgcgtgtgtatgtatgtgtctgcgtctgtgtgtgcgtctgtgtgtatctgtgtgtgcatgtgtgtatgcgtgtatatgtatgtgcatctgtgtgcatgtgtctatgtatgtgtgtgcatctgtgtgtgcgtgtgtatgcgtgtgtgtatgcgtctgtgcatgtgtgtatgcgtgtgtgtgcgcatcagtgtctgcatgtgtgtatatgtgtgtatgtatgtgtgcgcgcgcatctgtgtgtgtgcatgtgtgtatgtatgtgtgtgcatctctgtgtgtgcatgtgtgtatgtgtgtgtgcatctgtgtgtgtgtgcatgtgtgcatgcgtgtgtatgtgtgtgtgcgtgcgtgcatctgtgtgtgtgcgcgtgtgcccatgtgggtgcgacactagtgtgcatttgcacatatacatgtccccgtccgtccatgtttgcacatggtggcagatggggggtggctgggaggcctaggcagccaatgagcctaggtgtgcaggctcaggcccagagagtgatccaccttccccagtcggttcaggccctgatcaaagacttccaggggaccccgactttcacctacaaagcggcccatatcttcttcaccgacagtgagtgaggagagcctagggtgttggtgggtggggcaaggaggtgtgggggctgctctggcctgatgccccactcctgcctcaccccagcctgccccgagcccctgttcagtgagctaggccgctctcgtctggcaaaggtggtgaagacgttgaaggagattcaccttgccttcctcccctacgaggcccaggtacggcccgggctcatcctgggcagggggtgggggtttgtgaccaaatgtcccctgttccctcagaaacagacactgaggctgggcgcagtggctcatacctgtaatcccagcgctgtgggaggccagggcaggaggatcacttggggccaggagtttgagaccagcctgggtacagagcaagaccccgtctcttaaaaaaagaaaaagaaagaaattagcttggcgtggtggcgtgcacctgtagtcctagctactcatggggctggggtgggagagtcgcttgagcccgggaggtcgaggctgcagtgagctatgattgcactgctgccctccagcctgggcgacagagcgagatcctgtctcaaaaacatacataaagtaaaattttaaaaaggggaggtacccacagagtccaaggagctcttgccttgagttctatcccactaggcccttgcagggggcagcgtagagcgcaccgcggggttgtccagccagcttaagggacacgggctggggtatttatccactgactcctgcaggcatgggtttagggttgacctgggcctgcctccaattcggcaaagcaggcttcagggaccagggacggctcccaggaggtgcaggtggcggcagcgggaagcggggcaggtgtgcacctgcagcggcaaccctggtgcttctgtcccctcctcgcccaggtgttctccctcgatgctccccacagcacctacaacctctactgccccttccgggcagaggagcgcacgcggcagctcgaggtgctggcccagcagattgccacgctgtgcgccaccctgcaggagtacccggccatccgctaccgcaagtggggaccccacccagccccaccccgatgccgacccccccttaaccgcgtgcaacacctaacctttaacctctcttgtgaccccagccccggccctaccctggcccctgactctcaccttcaaacccatccttgaccccatcccctgatgatgtcccccgtgtctgacctccccgccaggggcccagaggacacagcccagttggcccacgccgtcctggccaagctgaacgccttcaaggcagacactcccagtctgggcgaggtgagggggcgtgcttgggaggtgaggggcagccccaaccggctcagggtcagtgcctcattcctgccctaaaccccaccccagggcccagagaaaacccgctcccagctgctgataatggaccgggcagctgaccccgtgtccccactactgcatgagctcacgttccaggccatggcgtatgatctgctggacatagagcaggacacatacaggtctgcagacttggaacccgtccccacccttgccactgacctggttccccagtcctcagctcccctgacccccaggctccctccttcctccccaggtatgagaccaccgggctgagcgaggcgcgggagaaggccgtcttgctggacgaggacgatgacttgtgggtggagcttcgccacatgcatatcgcagatgtgtccaagtgcgtgcacacggggaccggatcccccccccaccgcccactgtgggcctggtagcggccttgggatccctggctgctgccaagtctttggccctcatgagcacccctcgtgtgactccagactggcctccaatttcaccccacctctccctgtcccccctgagtgggctcacccatggcctgtggctcctctcccctcactctcacccccgcccaccctcatggccaggaaggtcacggagctcctgaggaccttctgtgagagcaagaggctgaccacggacaaggtaggggcggacccaggtcaccaaaggcgctggtggaaggaagcccccctccccatgggcgcagggccacagcctggatttcgagcctggactgagacccaggtgggcactgcctggcttcgccccccaatccctaccctcttccccctacttccccaggcgaacatcaaagacctatcccagatcctgaaaaagatgccgcagtaccagaaggagctgaataaggtgtgctcgggtgggcagggagcggggacacctcggcccctcaaccccatgctctgtctgcgttctgccttgactcagcctttgttatcccccaacccccaccctgcaccctgcagtattctacgcacctgcatctagcagatgattgtatgaagcacttcaagggctcggtggagaagctgtgtagtgtggagcaggtggggcagggcttgcggggggcaggggtgatggtcctgccaaggcggggtattggggaggggctgaactgtagagatggggggttctgggggaggggcagggcttgtggagaggtggaggggccttggagagaggtgggacctggtggggaaggagtgggtcttgtggagaaacggtcctaggatgagggtgtggcctgtgcataggtggatggggcttggagaggtcagacttgggtgaggggcagagccttggacaggtggtcccaggacaggaatgtggcctattcataggtgggtgggaccttggagaggtaggcagggccttggagaggtgcgacctgggagaggaatggagccttggagaggtgggacctgggtgaggggcagagccttggagaggtgggacctgggagaggaatggagccttggagaggtgggccctgggagaggggcggagccttggagaggtgggacctgggtgaggggcggagccttggagaggtgggacctgggtgaggggtggaaccttggagaggtgggacctggatgaggggtggaaccttggaggggtgggacctgggagaggggtggagccttaagagaggtgggacctgggagaggggcggagccttggagaggtgggacctgagtgaggggtggggccttggagaggtaggagctgggagacaggtagagccatggagaggtgggatctgggtgaggcacggggccttggagaggtgggacctgggtgaggggtggaacctcggagaggtgggacctgggtgaggggtggagccttggagaggtgggacctgggtgaggggtggagccttggagagctgggacctgggtgaggggtggagccttggagaggtgggacttgggtgaggggtggagccttggagaggtgggacctgggtgaggggtggagcctcggagaggtgggacctgggtgaggtgtggaacctcggagaggtgggacctgggtgaggggtggaacctcggagaggtgggacctgggtgaggggtggagcctcggagagctgggacctgggtgaggggtggagccttggagagctgggacctgggtgaggggtggagccttggagaggtagtctcaggatagtggtgtgacctgtgtgtaggtgggtggggcactggaaaggtgggacctgggtgaggagcagggcctgtggagagactgtccctggacaggggtgggaccttgagagacctggtgctgagatgaggtaggacccaaatgtcctcttgccgaggatcctggggatgtccttggcccgcctctcccatccccttccctgacacatagcggccggtggacggctgaccccatgcccgcaggacctggccatgggctccgacgcagagggggagaagatcaaggactccatgaagctgatcgttccggtgctgctggacgcggcggtgcccgcctacgacaagatccgggtcctgctgctctacatcctccttcggaatggtgggtgggggctgcagggagttggaacgtccccatttgccagcgtctcccacgatcctgggaactgctgaaccccacagctctccttgggtcatttgcactcaccgggctcaccaacccccacagctacccctctggacccgggaaccctcctccattggcttggggattcctccactgaggtgagggctccctgctaacgtagaaaccctcacatctgtgattcctatagatgtggggctccctcagctcatctggaggagcccctgatctaccccctccaggtttcccactcttgctcacactagcacagggtactgaggccctccccactgcaaggttctctcatcagagtcctgggagctcctcagcccaccccaaactcccctaaacctgggagctcacctggccgccgcctccaccctgcccattcccgtcccccaggtgtgagtgaggagaacctggccaagctgatccagcatgccaatgtacaggcgcacagcagcctcatccgtaacctggagcagctgggaggcactgtcaccaaccccggggtacgccaggagcgggcatggggggaccctgggagagggtgcggatcacagccggggctctgcaaggcagagggccattggtgcacaggcacggtgtggttcctggcgtggtgtggttgctgggaggccaaaagcagtgtttcgggtctggtctggggcccagaggacactggggcctctcccagtcccagcttacacaataggcaggggaagtgagacatggtcgctgccaggctggtcctggcagtggtgcagttgggagcgggtggtctgagtgctagaggcagggagtagggtccccagcatgggggctacaccacattgtctatctgggctcccaggggtctctgagggtcccccgcacccatccagcacccacacacagccatgtgtgtgcttgactcttgggtcagcctctcctgtctctctctggccctgtgcgtccccctccagggtgccctcaccccgtccccatctctcccccatccctcatccatctcgctgtgcactgtttctccatatctctctctctcacccttctctctgccttcccctttctctctgttctctgtcttgctcccctcccctctccgtcccccttctgtccccatcttcctctctctgtttcctgcttcatctcttgtctctctctttgccttcatactttgtctcactgcttcttatctctttgcctatctctgcctctgtctttgtctttctctggctcgctctctctccctttggctttctctctccgtctctctctggctcactgtttctctctctcgctttcttgctgtctctcgctctctctcgctctctgttccacttccccatctttgcctgccatcccccaccctaccagccacaccaggcgcagcccctctgtgaccagcctccttcccctcaatccccctgctgccctccctgccctgcctgtagggctcggggacctccagccggctggagccgagagaacgcatggagcccacctatcagctgtcccgctggaccccggtcatcaaggatgtaatggaggtactgggtggcaggtcagggtgggggccagccctccgcatcggctggcggctcagcctccctcctgctgaggtgctaagcctcagggcttaggggaaaatgctcattgctggcattcccttggcaccgatctgctctgctgaggggggcacgccaagcccgcagctgaggaattggggtgacagcggggcctgtgctggggagcctcacttcctccccacctgccggctgcctccgctatatctctctagtctgttcccctgtcccgcaggagtgcccctgagccccagccctggccttcccaggatcccagggcagcaccatccaatggcaatgggcctggggcggcttcctggcttcctccttgtccctctaagagccccggcccctctttctgcgtgggggccagagacctgggcctcctcatccccatggaccttgaatacctggacttctggggctctgaggggctgagagcccagacactgggttccccaaagggctgggggtattgactgatggtccccaagggcctggaggcccagactactgggttgccgaggaactgtgggtttagacttctgggtacccaaggagttatggaattagattcgtgggtccccagtgagttatggatctagatttctaggtccccaatggactagaggcctagactcctgggtcccccagaggcaggaggtggagatgctggttcctgtctgccaggatcttggcccctgaataccccgtggggggcactcctgaccccggaccccatgcctggggttcctcccctaacctgcctctcggccgccaggacgccgtggaggaccggctggacaggaacctgtggcccttcgtatccgaccccgcccccacggccagctcccaggccgctgtcaggtgaggccccggggccgcccccgcccacgcctgggtctgtgttaggtgggcggcctggcggcggtgagggcctcctgcctggactttctgcccctgccctgcacagtgcccgcttcggtcactggcacaagaacaaggctggcatagaagcccgggcgggcccccggctcatcgtgtatgtcatgggcggtgtggccatgtcagagatgagggccgcctacgaggtgaccagggccaccgagggcaagtgggaggtgctcattggtaagtcaccaggactgggaccctggggtctggggcttgggttcccggggcctgggcttgtaccttctaggtgtctggactccagagtccttggagtcagggacctggtttgctgagggacagggacagccccacaccagccgggaccgggagcctgtcaaagacgaaggcagcgccccccaacatcttccccaaacctctgcccctgcacaggctcctcacacatcctcaccccgacccgcttcctggatgacctgaaggcactggacaagaagctggaggacattgccctgccctgacccctggccccgccccctacccctccctttccagagaaataaactcttcccgtcgctctgccagccagtgcctacctcaccttcttatcaagggagtccctgggagttgtgctgagccaggcctgtgccccaggccccaccaacccctattatcctctcagaaggagaattagcctctccctgcccctgagggcatctcaagccctcatggaggttaagaacttggacttttggcagggcacggtggctcacgcctgtaatcccagcactttgggaggccaaggcgggaggatcacttgaggtcaggacttcaagaccagcctggccaacatggtgaaaacccatctctactagaaatacaaaacaactagctgggtgtggtggtgtgcacctgtagtcccagctacttgggaggctgaggcaggagaatcacttgaacccaggatgtggaggctgcagtgagccgagattgcccctttgcactccaacctgggcaacaaagcgagactccgtctcaaaaaaaaaaaaattggactctcatttgaatatcagctctaagatattctagcggtgaggccctgaccaacttccggggttcccaatctaaaaacagggagcccaaaatagcagctgctttgcagaggagagaacagagatagcgcaggaaggctggtggcgtgcaagcatgacagctgctgctaccccattttcactggaaccattttggctgctccgttaatattgttattaagcagaatggaccctggaactccaacccccctagaactgttccaaggggacctgtaggcatacgatgccaggagttgtgttcagcttctgctgtattcatgtgaggcacacagcaaacgctccctgctttctcctcccagccccacggggttcacagagactcctgactgcaggacttatcagggccttcggtgggtgtatctgtttgctagggctgtcataacaaagtaccacagactaggtgacttaacagaaattgccaggcaccgtggctcatgcctgtagtcgcacattgggaggccaaggcaggttgatcacttgaggccaggagttcaagactagcctgggcaacatagtgagatcctgtgtctacaaaaaaatagaattagctgaatgtagtggtgtgcaccgtggtcccagctactcaggaggctgaggtgggaggatcatttgagcctgggaggcagaggttgcagtgagccaagaccgtgccagtgcactccagccttgggtgacaaaagcgagacctccatctcaaaaacaaaactataatcccagcactttgagaggctgaggcaggtggatcacctgaggtcaggagttcaagacaagcctggccaacatggtgaaaccttgtctctactaaaaatacaaaaattagccaggtgtggtggtggacacctgtggtaccagctacttgggaggctgaggcaggagaattacactacgcctccttcgggaggcggaggttgtagtgagctgagatcgcaccgttgcactccagcctgggcaacagagcaagactctgtctcaaagcaaacacatttatagtcttctgtttctagagactggaagtccaagatgaagatgtccacaggtgtgactccttctgaagcttctctcctttccttgtagacagctgtgttttccctgtgtgttcacacagtctcctccccccgccccagtgcatgtctgtgtcctaatctgctcttcttacaaggaaactggtcatgttggattagggcccacgcatatgacctcatttttacttaattatttctttaaagattctatctccaagtatagtcactttctgaggcagttgcggggcaggacttcagcatagacatttgtggagaggacacagttcagcccatagcactcaagtgaggtgtgaatctcacagcaccaatagaacaggagaggccgggcgaggtagcttacacctgtaatcccagtgctttgggaggcctaggtgggaggatcgcttgggcccaggagtttgagaccagcctgggcggcataacacgatcctatctctacaaaaaaattttaaaattaaatttttttaaaatttttttatgggcatggtgtcttgcacctggggtccagtttactcaggagactgaggtgggagatcgcttgaggctaggagtttaagaccagcctgggcaacatagcaagaccccatctctacaaaaaataagaaaaattagtcaggcacgtgatggcacacgcctgtagtcccagctgctcaggactttcaggtggaaggattgcttgagcccgggaggttgagactgcaatgagctatgatcatgccactgcactccagcctgggtggcaaggtgacaccctatctcaaaaaaaaaaaaaaaaaagaaaaaggaaaagaaacctctctggggcacagatatacagccagccacatgagtaatctgaggcaaaaggggctgtgggagcccatatcacatctaatccacccagactgggggcaatcagggaaggcttcctagaggaggcagcatttgcatagagaatgaaaatgaagggggcgaagggaagggaggggagggcagagcagaagccaaggccagagaatgcaggaggcccctgaggagctggaggggagggtactgacctgcaacccaatctgagaaccacgtggaggttctggtgaggccatggtgagggttttggtccctgctgaggccataggacatcatagacagggtctgagttgggacaggtagggacccatgtctcatgttggcagtgaaattctcactgctggagtgggtgcctggggagggggcagagggtggggaagcatcctcttcagaggtagagcctctcttaccgcctgtgctcaagcgatcctcccacctcagcctcctgagtagctgggaccatgagtgcacatcaccaagcccagttaatcttttaattttttgtagagactgggtctggctatgttgcccaggctggtctcctgggctcaagcgatctgcccacctcggcctcccaaagtactgggatgacaggcgtgagccaccgtgcccggcctctctcctgattttgaggtcacagatccttttgagaattcagggaaatctaaggacactcatcccagaaaaactgcacacacaatttgcaggtgggggctaaggaaaatgcagccccctctgattcagcagttccacaattaggatttatcggaatctcccaccagggcagggagatggatgaggagagttgtgaaggggatgaggtgtggggaagaaagtgggtcggctgtggacccctggggtccgcctgccctggatatgcctttgcagggcctcagcagggacgcgttttaacttacgggaggtgcagggagtgggagggaggtggttttaatgtttaaaacttaagctcaaggtcgggcacagtggctcacgcctgcaatcccagcactttgggagggcgaggtgggaggattgcttgaggccaggagtttgaggccagcctgggcaacatagcaaattcctaaatatatgtatttttgagacaaggtctcactctgttgcccaggctggagtgcagtggtgcgatctcgattcactgtaacctctgcctcctgggttcaagcgattctcctgcctcagcctcccaaaaagctgggatcacagacgtgcgacaccatgcccagcgaatttttgtacttttagtagagatggggttttgccatgttggccaggctggtctctaactcctgggctgaagacctcccacctcagcctcccaaaatgcaggaattagaggtgtgagccactgtgcccagccaatctctacaatactctttttattttattttatattatattatatttatttatttatttattttttggagatggagtctcgctccgtcgcccaggctggagtgcagtggcatgatctcagctcactgcaacctccgcctccccggttcaaccgattcttctgtctcagcctcccgagtagctgggactacaggtgcgtgccaccacgcccagctaatttttgtatttttagtagagacggggtttcaccatgttggccgggatggtctcgaactcctgacgccgtgatccacctgccttggcctcccaaagtgctgggattacaggagtgagccaccgcgcccggccaatactcgttttaataaaaattttaaaatgtattcacgcctaactgggtagttacttgatacaataaatgatcttttctagattaagaaaaaagaaaaaaaaacatttaaactcaatttcctgggaagccgcagttttgcgccgggagtggcttgtgtaggcacgcgctgcgaacgccagggggcgctgcggcgcaatttcccggtttctttgatcttccgcgtctgtaactggagatgaggtgacccgaattagacacgacggggaagtaggtcaggggttattccgtggttctcagcggagacaaaagtctgttgcttaaaccgcctctgcctctgctccttacttatacccaggtgatgcaatgtcttcacactaaaggcaaatattgagtctacaaatatttatgtgtccctgtgggcggcggcagctgacaatatcgggtcctaacgagcacgaagtcaagctccctctgcacgctttatgcagatcctcaaaaccctcctgtgaggatcgctggagcctaggagttcgaggctgcagtgagctatgattgtgcctctgccctccagcctgggtgagaaagcgagaagttgtgttaaaaacaaaaaaaaagttggggggccgggcgcggtggctcacgtctgtaatcccagcactttgggaggccgaggcgggcggatcacgaggtcaggagttcaagaccagtctagccaacatggtgaaaccctgtctctactaaaaatacaaaaattagccgggcgtggtggtgggcgcctgtaatcccagctactcgggaggctgaggcaggagaatcgcttgaaaccggaaggcagaggttgcagtgagccatcatgccactgcactccagcctgggcaacaagagcgaaaccctgtctcaaaaaaaaaaaaaaaattatcctttgagatcccttcccccaagtccatttcccatctcatggtgaacctggctgctgttcttcaaacacaccacactgtccctgccccagaacctttgcacctgctattcccatcatccgcaatgctgtgccttgcaagctattgtactccttcctccttcccttccccagctgggagaggcccctgctttacttccttgtggtatccccacttagggtgctttctttctggttctcttctggtaccgaggaatgatcctcattctggatttggcaggttgcttcctctctccccatccctgccccaatgtttaccctataaatggcttagaaccacatgctctattggaataagggtcagttgcagccagaataatatcatgctggtagggccgggtacttcctggtacatcacatcagggggtccataacgtcatgtcactacgattgatgggtgggtttggggaatgtccctggtccccagtaactctccacataaagatgttaacaggagctgggcccagtggctcacgcctgtagttcccagcactttgggaggccaaggcaggaggatcacttaggcccaggagtttgagaccagcctgggcaacatagcaaaaccctgtctctactaaaaataaaataaagaccgggcacggtggctcatacctgtaatcccagcactttgggaggctgagatgggcggatcacttgaggtcaggagttcaagaccagcctggccaacatgatgaaaccccgtctctaccaaaaaaccaaaaattaaccaggcgtggtggtgcacacctgttatcccagctactcaggaagctgaggtaggagaataacttgaatccaggaggcggaggttgcagtgagctgagatcatgccattgcactccagcctgggtgacagagtaagactctgtctcaaaaaataaataaataaaatacaacaaaataaaataattagccagatgtggcagcaattgcttgtagtcccagctacatgggaggctgaggtgggaagatcacttgagtccaagaggttgaggctgcactgagttatgatctcggcactgcactccagtttgggcgatagagtgagaccctgtctcataaaaaataaaaataaaaaaggaaagaaaagaaaaaaagtcattagcagccatcaattttgttgttgttattgtttgtttgtttgtttttgagatagagtttcgctcttgttgcccaggctggagtgcagtgatgcaatcttggctcactgcaatctccacctccagggttcaatcaattctcctgcctcagcctcccaagaagctgggactacaagcatgagccaccatgccaggctaatttttgtatttttagtagagacggggtctcaccatggtggccaagctggtcttgaactcctgacctcaaatgattcacctgcctcatcctcctaaagtgctgggattacaggcatcagccaccgtgcctggcccgccatccatttttgattcattactctcttgaggattatgtccaactttatcattcctgctactggaattagctgtggttcttctgaaaaaggctttctgcttccctccggaactagctggtttgtacagaaagtgacaacgtgatacattgacttatgtattatttgtggaatgccttgaggcaagcggttacatgagctcagcagaagagcctggaatgggcacagccctgagggtcacgtgtggctcccttggaagcatctagggagcacccaggaacgattggctgccatagtaattactatctaatttattagatatagtaaaaataaatttattactaattatcactaacgattctgattactgggtgagaacaatggtgatctcatgtatttatgtgcattacagggtgagagttctccttcctgtggcgtgcaggagattctagaatagaaactcattgaaagagtgagaggaaaacatttgtgatcttgaacctgttccgcttaaaaatacatgagggaggccgagtgcggtggctcacgcctgtaatcccagcactttgggaggccgagttgggtggatcacctgaggtcaggaattcgagaccagcctggccaacacggtgaaacctcgtcactactaaaaatacaaaaattagccaggcatggtggcgggcacctgtaatcccagctactcgggaggctgaggcaggagaatcacttgaacccagggagtggaggttgcagtgggccgagatcatgccactgcactccagcctgggtggtacagcaagactctgtctcaaaataagtaaatagataaatcgattaataaaaaatacatgagaggacgggtgcagtggctcatgctggtaatcccagcactctgggaggccgaggtgaaaggatcatctaaagctgggagtttgagaccagcctgggcaatatagcaagacccctgcctctacaaaaaatgtagctgcacctggtggcacacacccagctacttgggaggctgaggcaggaagatcacttgagtctgggaggtggaggctacagtgagctgtgattgcaccactgcactccagcctgggtgacagagcaagacctcatctccaaaaaaaacacaaataacaaaaacgtgagggtccagagaaattaaagctgcgggctgggccagcagcagtggtggtgggatggtgaagccagcgaccctagcagagaaatcggggacaaaggaatcagtgctggagacctgcagaggaggcgtcctggacccagacaggaaaaggaggtgatgtaactcaacgaagcaaggaaatctcgtggaaatgagtaaggtgacaaagagaggccacccagggggagacccagacattgagggtagcttcccttttattttctgtaaagttgctcaaaaaccttaaaacacagttgaccaacagctgctgccaagaacattgtgaaaaggtttctgggtaaggaaatggccctgcgaatgggaaggttccgctctggtgggatcagagatgaggtgtccagggctgggataggcaggccaggatagcaaagccctggcagacagaggctccattttgggtgtccttcattcccttcttttttttttgaggcggagtctcgccctgttacctaggctggagtgcagtggcgcgatctcggctcgctgcagcctctgcctcccgggttcaagtgattctcctgcctcagcctcccaagcagctggcattacaggcatgtgccaccacgcccggctaatttttgtatttttagcagagacaggctttttccatgttgcctaggcaaatctcgaactcctaatcaagcagtccacccgccctcagcctccttcattcacttctgagatgattcagtttctgtctctgttggcagctgggaaagttctgaaaaaagaatgaagagcagtccaggcgtggtggctcgcaactgtaatcccagcactttgggaggctgaggtgggcagatcacctgagcttgggagttggagaccagcctgaccaaaaaggtgaaacctcacctctactaaaaatacaaaaattagctggaaatggtggtggatgtctgtaatcccagctactcaggaggctgaggcaggagaatcgcttgagcctgggaggcagaggttgcagtgagctgagattgtcccactgccctgcagcttgggtgacagagtgagactctgtctcaaaaaaaaaaaaaagaaaaagaaaaagtaaagacaatggcatcagacaaattctggctctgaaatctaggctagctggcctggtgactttttttttttttttttcatagagatggggtcttgctatgttgcccaggccgggttttgaatttttggcctcaagccatcctcctgcctcagcttcccaaagtgctgggaatataggtgccccactttttttttttttttttgagacagagtctcattctgtcacccaggctggagtgcagtggcgcaatcttggctcactgcaaactccacctcccagattcaagcgattctcccacctcagcctcccgagtagctgggattacaggtgcccaccatcacacccagctaagttttgtacttttggtagagacagggtttcaccatattggccaggttggcctcgaactcctgacgccagatgatctgcccgcctcggcctcccaaagtgctaggattacagacataagccaccgtgccctgcccttttttttttttttttaagagtctctgtctgtcacttaggctggagtgcagtggtgcaatcatagctcactgcagccacaaactcccgggctgaagcaatagatcctcccccttcggcctcctaagtagtggctgggattacacgggcatgccaccacacccagctaatttttaaaaagtttttgtaaagacgggggttttcctgtgttgcccaggctgaactcaaactcttgagctcaacggatcctcctgccttggtctcccaaggagctgggattataggcgtgagccactgtgcctggccctggtgaccttttgacagtagccccgccttccccagcgtgggttttgccctctgtaatgttgcgtagggctgttgcgatcacagaaggtggtggagtgtgagtacttctggggtacttgccggaggctggggatttgtggaggtgtgtggctcagttttattccaggaaaccgtggccagacgggcctgtcagcaccttccctttcatctacagttcctcaattgggggggtgtgagttgtttcataagcccctccccctcatttcttgcaggaaagtggtaatgcaaagaaacttttattttatccacatctatattctttgtaaccttttaaaataagatacttggcctggcgcctgtaaccccagcattttggcaggctgaggcaggcagatcacttgagttcaggagttcaagaccagcctggccaacagggtgaaaccccacctctactaaaaatacaaaaataagctgggcacggtggcgcacgcctgtaatcccagcacttttggaggccaaggcgggcagatcacctgagttcgagagtttgacaccagcctgaccaacgtggagaaacccccgtctctaataaaaatacaaagttagccgggcgtggtggcgcacgcctgtgatcccagctactcgggaggctgaggcatgagaattgcttgcactcgggaggtggaggttgcagtgagccgagagggttagggttagggttcaggaggaaggaaaaacctagggtgtttagccccggaaatctctcttttgatgttcactgcctcgaggttcttgctacctcttgctccaagtcacagcctggccccagcaggtcatgccagagcccccagcctgtcctctgccaagcggtggtcctggcagctgcttagactcccactccgaagctggatcatctgtagatgggaagtgtttgcataaatggggccaaggagtgctctccagctctttggtaaagaagcctgacagccgccaaggcttttacttttattttccatccttcacccgggaggggaagcaagtatcactgtgttctgatttggcagagccacctgtcattgcaacttgtcaccagggcaacaagtcaccatcttagtaaggcagccaatgagaagcatgggtttcctctggtggtcggtttcacagaacggcaacagtttctaggcatccgagtgataccagaactctttgttcaaataaggcttcaaggacagatgtatagtgacagagaggagaacaagctggtagcaattatgaattttcacaaggaaaactagttgtggggagcagaaaaatcctctctgtggcttcaggaacaaagaggccatttcccttgggtctttaggaaaccccttttttccaactataatttattttattattattttttgagatggagtttcgctcttgttgcccaggttggagcacaatggtgcgatctcggctcactgcaacctctgcctcccgggttcaagcgattctcctgtcttagcctcccgattagctgggattacaggcgtctgccacaatgtccggctgatttttgtatttttagttgagacagggtttcagcatgttggccaggctggtctggaactcctgacctcaggtgaacttcccccctcggcctcccaaagtgctgggttacaggcgtgagccaccgtgcccagcccagcgataatttaaattacaagtatttggcccggcattagtggtgcatgcctgtaatctctgcactttgggaggtcaaagaccaaggatcctggcaacatatgagaccctgtctctacaaagaagaatcaattttttcaattaactgtgggtggtggtgggtgcctgtagtcctagctactcaggaggctgaggcaggaggatcgcttgagcccaggagttggaggatgcagtgagctctgatggcaccactgcaccccggcgtgggagatcgagacagagtgagacgccatctctaaaaaataataataaataaataaatacgtatttggtggtgatggttacaagatcgtgtgcagaattttagtgtatataaatgccaccttaataaaaactgatttttagaaaataattcttgggaaaaccaaaacgtgcagcaggcaggtagacacatttgtcaaaatgcatcaaactcagtaacagcagaccaaagactgcctgttctcacttataagtgggatctaaacttcaggtactcatggacataaaggtggcaataatgaacagtggggattgccagggaggggtgaggaaaaggggcatgagggttgaaaatctaactgttgagtgctgtgctcaccatctgggtgacagagtcgctcataccccaaacctcagcatcatgcaatatactcaggtaggagactggcacaggtatcccctgaatctaaaataaaagttgataaagagggtcccgggcgcggcggctcacaactgtaatcccagcactttgggaggccaaggcgggcaggtcgctttgaggccaggagttcgagaccagcctgggcaacatggtgaaaccccgtctccactaaaaatacaaaaattagatgggcgtggtggcgggcacctgtaatcccagctacttgggaggctgatgcaggagaatcgcttgaacccgggaggcggaggttgcagtgagctgaggtcgcaccgctgcactccagtttgggcaacagagcgagactccgtctcaaaaaaatgaaaaaataaataaaagttgataaagagggctggccatggtggcttatgcctgtaattccagcactttgggaggccaaggcaggcagatcacttgaggccaggagtttgagaccagcctgggcaacatggtgaaaccccatctctatgaaaaatacaaaaattagttgggcgtggtggtgtgtgcctgtggtcccagcactttgggaggccgaagtgggtggatcacttgaggtcaagagttcgagaccaacctggccaacatggagaaaccctgtctctactaaaaatacaaaaattagctgggtgtagtggcgcgtgcctgtggtcccacctactcaggaggctgaggcaggagaattgcttgaacccgagaggcgaaggttgcagtgagccgagattgtgccactgcacgccaacctgggcaacagagtgagaccctgtctcaaaaaaaaaaaaaaatttaaaaagttgaaaaagaaaaacaatgcatgaaaccaaacacataagataggcacattctactgtatgtaaattacacatcaacaaaatggatttttcaaaaatcactgtttctgggattttattagatagcatttggtacaaaattgaggtcagtagagctcagttttactggtagaaatcagaggaagttaaaggattttatgttttagaagagaattaaggggcatattgccttttcctgctactgaaccaagagttttcaaactgggtccctagggaaccctagaggttccatgcctaccctgctttctcctcaatctgtcatcacagctgcccactccttttgtgtcgttcaaaaggttttacccgaagagttctgagaacaaagggtttgaaaatcagagctctcaaaaaatgatttttctttttcttctttttttttgagacgggatcttgctttgttgtccaggctggagtgcagtgatgccatcatagctcattgcagtctcagccttcctgggctcaagtgatcctcacaccccagcctcctcagtagctgggactaccagcatggaccaccacacccagctaatttttttccattgattgattgattgattgattgagaccaaggctcactctgtcgcccaggctggagtgcagtggtgcaatctcagctcactgcaacctccacctcctgggttcaagtgattttcctgcctcagcctcccgagtagctgggattacaggtgcccgccaccacgcccatctaatttttgtatttttagtagagacggggtttcgccatgttggccaggctggtctcgaactcctgacctcaggtgatctgcccaccttggcctcccaaagtgctgggattacaggcgtgaaccactgcgcccggctttttcccttttatctttgtagagatggggtcttgttatgttgtccaggctggtctcaagctcctggcctcaagcgatcctcctgcctcagcctcccaaagcacaaggatgacaggcgtgagccactgcacctggcaataacatggtttctgtctcttttcaagctaccctttgtccagggtgtgtcaaagagtagctcaagaagagacagaagtcatgtcttcaaggaggcaggatgagctgggacttgagcatggggaaatatctggacaaaaacggacttgaaagttcctgctaggaccagaagagacagggagcctgtggaattcacttttcccctctagatcccctgtcccacaaatttgctttcagttcctctaaatacacacactccattctgcctcaggtccttggaacatgcagtcctctccctccacccagaaggccctccctaactgcctctcctggttaacccttctgcatcctccaccctcccttcaaacatcttttcctccccccaaaatactttctggattcccccatgtggggttgatttttaggtcagaggttctcacggaaaagggttcctctccttgggagatggaagggtccttgaggctgatggctgattgagcattctattggtgttttttgttgttgtttttttgttttcttttttttagagatggggtcttgctctgttgtccaggctggagtgcagtggtgcgatcatagctcactgcagtctccaactcctggactcaagcggtacttctgtctcagcctcctgagtagctgggactacaggaagccaccaccatccctgcctaatgttttcttacgttttgtacagagggagggtctcactgtgttggccaggctggtcttgaactcctgggctcaagtgatccacccacctcggtctcctaaagcactgggattacaggtgtgagccatggcgcccggacttttttttttttttttgagatggagttttgctttttgttgcccaggctggaaagcaatggcacaaccttggctcaccacaacctccgcctcccgggttcaagcaattctcctgcctcagcctcccgagtaactaggattacagctacccacctggtgtgccaccacgcctggctaattttgtgtttttagtagaaaaggggtttctccatgttggtcacgctggtctcgaactcccgacctcaggtgatccacccgcctcggcctcccaaaaggctgggattacaagcatgagccaccgcgcctggcccattgcccggcctttttattgctgttctgttggtgtctgcctttccctgactgacaagggccaactcgtcccgggcaagggcagcatccctctgcttcttagtgtatgcatggtgtttaacacagcatatggaacataatagttgctcaataaatattgcctgcgctttgaacctgtgtgcaccgttgcatttacacagggctttaatacacatgcatcatgttgattgaaatataaatacatagagaaaattgtgcaaatgagagttacagctgaaaacttttacaaaattcccccctcactaggggccttcctggtatgcttttatcaccactatctctgattccccaggactcttccatcgtcatttccgacagcataaattagttttgtttgtatttcatttattattattatcattattgtgagacggagtctctctctgttgcccaggctggagtgcagtagcatgatttcagctcactgcaacctccacctcttggttcaagcgattctcctccctcagcatcccgagtagctgggattacaggcacctgccgctacacctggctaatttttgtatttttaggtatttttttttttttttgagacggagtcttgctctgtcgcccaggctggagtgcagtggcgccatctcggctcactgcaagctccgcctcccgggttcacaccgttctcctgcctcagcctcccgaggagctgggactgcaggtgcctgccaccacgcccggctaatttttttggatttttagtagagatggggtttcaccgtgttagccaggatggtcttgatctcctgaccttgtgatccgcctgccttggcctcccaaagtgctgggattacaggcaggagccaccgcgcccggccccctttttttttaataaatggatttgtatggtatgttctttttggggtctggcttctatgctaacatatgttcgtgagaatcagccacatggttgggtgtagctgtaatccatggacagttgtctcattctcactcatcaccacataccaggggtacaaaaaaatgttttctgtaacgagtcagatagtaaacattctcagctttgggggccctactgtccaaccactctacagctgctgagctctgccatggacatgtgatagcagtcactgatgatatattaaaaaatggggccaggtgcagtggctcatgcctatagtctcagcactctgggaggccaaggcgggcggatcacttgagatcaggagatcgaagccagcctggctaacatggcgaaatcccatctctactaaaaatacaaaaattagccggacatggtggcgcacctgcctataatcccagctactcgggaggctgaggcaggagaatcgctttaacccgggaggcagaggttgcggtgagccaaggtcgtgccactgcactccagcctgggtgacaagagcgagtctccctctcaaaaaaaagggggtagcaaactgtgtgtgtgtgtttgtagggacaggatctcactatgttgctcaggctgccctcaaactcctgggctcaaacaatcctcctgctttggtctctcaagtagctaggatgacaggtgcctgccactgagcttggcaattttttttttttttgagacagagtttcgctcttgttgcccaggctggagtgcaagggcaccatcttgactcactgcaacctccacctcccgggttcaagcaattctcctgcctcggcctctcaagtagctgggattacagtcgcgtgccaccacacccggctaattttgtattgtaagtagtgatggggtttcaccacattggccaggctggtcttgaactcctgacctcaggtgatccacccgccttagcctcccaaagtgctgtgattacaggcatgagccaccgcacccagctgacaatgttttaagaaaattttctttatggactttttatgaaaattatatgaatttgaattttatatgatttctattttcactaaacattacaaatattttttggctaggcacagtggctcatgcctgtaatctcagtgctttgggaagctaaggtggcaggatcttttgaggccaggagtttgagaccagcctgggcaatagagtgagaccccacctctacaaaaaaattaaaaaaattagttaggtgtggtgacacatgccgtagtcccacctactcaagaggctgatgagggggggattgcttgagcccaggagtttgaggctgcagtgagctatgattgcaccattgcactccagcgtggaaaacagagccagactgtgtcttttttaaaaaaaaaacaacttttttttccctatggtttaaaaatgtgaaaattggcagtgcctcaaaaagttaaacatagaattaccatatgatcaggcagcactactcctggacatacgcccagaagaattgaaagcaggagctgcaaacagatatttgcacatctatgttcagagcagcattattcacaatagccaaaaggcagaagcaggccaggcacagtggctcacacctgtaatcccaggactttgggaggccgaggcaggcggatcactccagatcaggagtttgagaccagcctggccaacatggcaaaaccccatctctactaaaaatacaaaagaaaaaaaaattagccaggtgtggtggtggcacatgcctgtaatcctggctactcggaggccgaggcaggataatcacttaaacccaggagtcagaggttgcagtgagccaagatcgtgccacttgcactccagcctgggtgacaagagcgaaactctgtctcaaaaaaacaaaaaacaaaaaccttttagatccgccatctgtggtggagccgccaccaaaatgtagattttcctgaaaacccttacagggaagaccaccaccctcgaggctgaaccctcagatatggtagaaaatgtaaaggccaagatccagggtaaagaaagaattcctcctgatcagcaaagacaagcactggaagatgggcgtactctgtctgactacaacattcaaaaggagtctcctcttcatcttgtattgagaattcgtggtggtgctaaggaaaggaagaagtcttttttttattttttttgagatggagtctcgctctgtagctcaggctggagtgcagtggtgcaatctcggctcactgcaacctctgcctcccgggtcccagttcaagcaattctcctgcctcagcctcccgagtagctgggattacaggcacgtgccaccacgcccagctaatttttgtatttttagtagagacaggatttcaccatgttggccaggctggtcttgaactcctgacctcgtgatccacctgcctcggcctcccaaagtgctgggattacaggcctgagccactgagcccggccagaagaagaagtcttacctgcaagacgaataagcacaagagaaagaaggtgaagctggctgtcctgaaatattataaggtggatgagaatggcaaaattagtcaccttcgtcgaggttgcccttctgatgaatgtggtgctgcagtgtttatggcaagccactttgacagacattattgtggcaaatgttgtctgacttactgcttcaacaaaccagaagacaaataactgtatgaattaacaaaagacggccaggcgcagtggcttacacctgtaatcccagcactttgggaggccgagacgggcggatcacaaggtcaggagatcgagaccatcctggctaacatggtgaaaccccgtctctactaaaaatacaaaaaaattagctgggcatggtggcgggcgcctatagtcccagctactcgggaggctgaggcaggagaatggagtgaacccgggaggcggagcttgcagtgagccgagatcgtgccactgcactccagccagggcaacagagtgagactccatctcaaaaaagaaagaaaacccacaaaagacgtgaactaacaaaaacaaacaaacaaacaaaaaaacaaaacaaaagctggaagcaacccaagtgtccatcgatggatgaaggaataaacacaacgtggttcatccacacaagggaatgtgatacagccatggaaaggaaaacagttctgactcaggctacagcagggatgaaccttggggatattatgctcagtgaaataagcagatacaaaaggacaaacactgtgtgattccactcctaggaggtccctagagtcatcagatccatagaggcagaaagcaagatggagggtgccaggggctggggagagggatagggagtgagtgtttcatggggacagagtttcagtttggaaagaggagaaagttctggagatggacggcagtggtggctacataacaacatgaatgtgcttattgccacagaattgtgctctgaaaaatggttaaaataggctgggcatggtggctcacacctgtaatcccggcactttgggaggctgaggcgggtggatcacttgaggtcaggaatttgagaccagcctggccaacatggtgaaaccccatctctactaaaaatacaaaaaattagccgggcatggtggtgcacgcctgtaatcccagctactcgggaggctgaggcaggagaattgcttgaacccaggaggtggaggttgcagtgagccaagattgagccactgtactccagcctgagcaactgagtgagactctgaaacaaagaaacaaacaaaagcaatggttaaaatggaacaagatggtgcatacctgtagcttcagctactggggagtccaaggtgggaggattacttgaagccaggagtctgacactagcttgggcaacatagcaagaccccgtctcaaaaaaaaaaaaaaaaaggccgggcacggtggttcacgcctgtaatcccagcactttgggaggccaaggcgggcagatcacaaggtcaggggatcgagaccatcctggctaacacggtgaaactccatctctactaaaaaaaaaaaaatacaaaaaattagctgggcgtggtggcaggcgcctgtagtcccagctacttgggaggctgaagcaggagaatggcgtgaacccaggaggcggagcttgtagtgagccgagatcgcgccactgcactccagcctgggcgacagagcaagattccgtctcaaaaaagaaaaaagtaagttataatggtaagttgtatgttatatgtattttaccacaaaaaggcccgttgtactggaaacaaagaacaaataaaaatgtaataaccattccaagctcatgggtggtccaagaagaaacatgagctggaccttggcccatgagcaatggctttccaacttctgttgcaggtgatgccattgatggaataaaccatgatttttctttcttctttttgagatggagtcttgctatggtgcccaagctagtcatccaggatggagtgcaggggcacgatctcagtgcactgcaacctccacatcccgggttcaagtgattctcccacctcagcctcccaagtagctgggattacaggcacacgccaccacgcccagttaatttttgtatgtctaatggagacagggtttcatcatgttggccaggttggtctcaagctcctgacctcaagtgatccgcccgccttggcctcccaaagtgctgggattacaggcgtgagccaccggccataaaccatgattttatttaccagttctattgctcatgggcatttgggtatgaatgtggtatgtcattctcacccagagacataattattattactattttagagaagtggtcttgctctgttgcccagactggagtgcagtgctgtgatcataagtcactgtagcttcgaactcccgggctcaagcaattctctcacgtcagcctccttagtagctgggactacaagtgcttgtccgcaccatgcctagcaagaggcattaattttgtcatgtttgcatcagccacccttgcatgcaaaactctgcttgtctacctgttcctcagaccacagcccctggcattatccctggggcaccacctcctgaccagtctctggacatgaagacggaggccctgttggaagtgggaaggctcccttcctcctccagcccttactgtctgctcaggggcttcctcttggccccggatgtgggaccggagggttgggggcccagggacttattagccaagccaggaagccccaccccaagaggcctcaaagaaagagctgcggtgcaggaattcgtgtgccggatttggttagctgagcccaccgagagggtaagtgacagctgctcctgcgcttgccatggcaccagcggggaggctggggtcaaggctgagcctccatccctgtcccccacatggggggacaggggtccaggtccaggggcagatcctactccctccatgggccggatcttccccacagggcagggctgatccagctgtgggtctcttggttccctctttcagcgcctgcaggatgaaagctctctgtctcctcctcctccctgtcctggggctgttggtgtctagcaagaccctgtgctccatggaagaagccatcaatgagaggatccaggaggtcgccggctccctaagtgaggaccccccacttgggcaagctccccaagggtctcagagacctcactgatccctggcacagacctgactccaacccagccccagcgctcaccaaatctcatcctcaaatccaaccagatcataaattcaaccccaactccactcccaacccctccgactgtccccaccttatccacggctccaaacccaatccccgctctcactccaaaccttcccttactccaaaacacccaactcaagacagggtcctggaggccagtgagctcctatgcccacagggacctagctccaaaccaacagggctaggggaggatgggggagggaccgtttggtctcacagctccccctgtctcctttcctcctgccccccagtatttagggcaataagcagcattggcctggagtgccagagcgtcacctccaggggggacctggctacttgcccccgaggtgagtgcaggagactgttgtccaggcgcccatttctgttccaagtcccctgggaatgccccctccccgccacgttccccgtgtccagcctctactcccctaggatcttggtcctgactcccagccttctccgcccaccatctggacactggtgtccaccctcactccctgcctccagtgcccattcagtggttggagcctccagccgtccccgtccccacccccgcccccccaacccccctccgcgctccccacccccctcccgctcccaccctcagcctcccagctcagagtccacgctcctgtgttccgggctgcaggcttcgccgtcaccggctgcacttgtggctccgcctgtggctcgtgggatgtgcgcgccgagaccacatgtcactgccagtgcgcgggcatggactggaccggagcgcgctgctgtcgtgtgcagccctgaggtcgcgcgcagcgcgtgcacagcgcgggcggaggcggctccaggtccggaggggttgcgggggagctggaaataaacctggagatgatgatgatgatgatgatgatgatgatggagcggatctgagccctgcgtggtttctttagtaggcccggagggactgatctagcgtctccaagagagtggggcgcgtagctgctggagggggcggggacaccgcgactttctactgccccatcgcccttcctcctatggggtctccaactgcttcctccgaaaatagggcctgaacttcctctagtgacgtccccacccaaggctcatggctgccttcaagaggtgacgtctcatctttgaggctaccttgacgctcaccctggggtctccgacctccccaggaagtggctgggtccttttcccccagtcctcataatgaggcttcatcgaggacctgggtcagtctgggcagtggacgggaccctccagggccccaagactccaggagccccaggtcagggtggaaccctgaatcatgtctcagcccagagctggaacctgtacccctcacttcctacctgcaaggaggaatccccaaggcacaggcaaagttgggttacggagagtcagggacgcctacctgacgtcacgcatcatcacaagctcacgttttcacacaggcaagtgcagttgtgagtagttagttacaaccagatacacgcagggtgcttaccccttcctggatactagattatgaaaacacagagcaggggacttgtctgctcctagatcccccccagggtttcgtttcttcccttcccttcccctcccctcccctcccctcccctcccctcccctcctctcccctcttctcttttctttctttctttctttttttttttttgagacagggtctcgctctgttgcccaggctggagtgcagtggtgcaatctcggctcaccgcaacctctgcctcctgggttcaagcgattctcctgcctcagcctcccacgtagctgggactacaggcgctcgccaccatacctggctaatttttgtatttttagtagagaaggagtttcaccatgttggctaggttggtcttgagctcctggcctcaagcgattcacccgcctcagcctcccaaagtgctgggattacatgcatgagccaccgcgcctggcctattttttaatttttattttcgagacaaggtcttactctggcgcccaggctggagtgcagtggcacaatctcggctcactgcaacctctgcctcctgggttcaagtgatattcctgccttagcctctcaagtagctgagattacaggtgcccaccaccatgcccagctaatttgtatttttagtagagagcgggtttcaccatgttggccaggctagtctcaaactcctgacctcaggtgatccacccacctcggccttccaaagtgctgggattacaggcatgagccactgcacccagcgcccccagggtttagaatagagcatggaacacagtagacgttcagtaaatgtctgttgatcagtagccacatgtgcacttagatacagcaccgacgtgcacatactgcacatgcacacacagctatacacagccacgtgcacacacagagtacacaacccacctaccacggccacatggagacaccacatccacagacacacccatgtgcccctagacactcttggacacagaaaggcaccacccccccggccaatgcacggagaatcgcagatttgactatggtgggcagagatgatgcaggacacaaacacacacatgctccaggcagactcttgcatttctgactctagtccccactgcacctggataagtatctgataccctagtgcagcgatccccaacctttttggcaccagagactgttttcatggaagacagttggtgtgtgtatggggtagggggggagcggggatggtttctgggtgattcaagcgcattacatttattattcactttatttttattattatgacattgtaatatagaataaaataattctacaactcaccataatgtggaatcggtgggagccctgagcttgtgttcctgcaactagatggtcccagctgagggtgatgggagacagcgacagattaccaggcatttgattcttataagaagtgagaaagctacatccctcaaatgcgcagttcacgatgggattcttgctcctatgagaatctaatgctgctgctggtctgacaggaggtggagctcaggtggtaatgcgaatgatggggagtggctgtaaatacagatgaagcttctctcgctcgcccaccactcacctcctgctgtgaggccccgttcccaatgcccggtggctggggacccctgttctagtgggcaaaagcctcagcatcccccgcctcagctccctggggcacaaattcaggtgattcggggtccagttctacaggaagcctgacccaggagtcttgccatccagtccctgatttcccaccacagacttcagaattcctagcacctagtcttgaaagggatcccagactcaaatgtcacacctggacaacagatgatagagtgaggttctggtttgcaggatgttttggactctcctcccactgccacccaccccctgtgatggtcccagccccctgtctgatgctggtggccatgagcagagattacaaccacttctggtgccagggaccccacccagactccagcccagggattcccttcccagaccctctctcctgactccacagtggtcatgggggtagggcaggaccactgagttagaagcatggccagggccagagagggtgagtctagtgccttgtgtgtgtccctgccccttactgctgtgtgtgtgtgttgggggcggggatgctccattgtccccagaactatttgtctccacccccatccaatagtcctgtatctgaaacctaagagggctctcttcaggttcctcaattccaacatagacattctcctgccccagagtgcagacttggaggtcatatctgcccaggtgatgtggacaggcaaaccccctattagagcctcaatttcctcaatagctaatgcctagatcccctgtggtaggcaagatatcctcctccctcctccctcctccctccctccttcctcctcctcatccttctcctcctcctccttcttcttcttcctttttgagatggagtctcactctgttgtccaggctggagtgcagtggcacgatctcagctcactgcaacctccacctccaggttcaagtgattctcctgcttcagcctcctgagtagttgggattgcaggcgcccaccaccactcctggctaatttttgtatttttagtagacacggggatttcgccattttggccaggctggtctcaaattcctgaccttaagtgattcacctgcctcggccttccaaagtgctgggattacaggcgtgggccacagagaccagccaaggcaagattcttctgcttgcaagtacaacagaccccacttcaaactagcttgggcaaaactaaaaggaagtttcttgtttgtgtaactgacaagcccagggttagaacaacaggttcaggtatggcttggaaccagggtctcaaatgatgtctccaggacccagacttcctctcgggtctgattttctcagcactgcctttgctctcaagtaaattcttccctgtcacagctcccattacatcctcccattgtggcagccctagtgagggctggaaaaaaaagagaatgctttttcccccgtggttaaaccaataaaaatcccagaccagcgtttcattggctggatcttgctcaaatgcccgcctctctgcccaatcttagactctggttggctgggtctggatcatttgtccactgtaaaccaatccctagcttatggtttgctggatctagcacacattttctttcttaaaagaaaattgagaatgttaccctatgaaagggacgggtgctggtcaggcagctttgcagatgtttcccacatgacatgattgcttgtgggcctctggtttagcgtgacctttttctcaaaggaagtccagagcctggagccgcgtctcagccccacccaagcccgggaaatgtgcaacgctgtggctccaccccctgtgcctgtccatcaaggcagagcccacatccaattggtccgtctgctccattagaaggcggtcctatagctcagtaactgacttctttctaagaccaaatggagcagctggcatgaagtcattatcaaattgatctttcttggagacacaggatttggcaatattttaggaaacagaactttatcctcaccagatctcgacgctcatttctcaacattcaagttgtctgaaatttaaccacatatttttaaccaaaacatcatcactttctgcacataagacagtcttatacttgttttttcttcttttcttcttccttccttccttctttcttctttcttcttttttctttttttttttttttttttgacggagttttgctcttgttgcccaggctggagtgcaatggcgcgatctcggctcactgcaacctccacctcccgggttcaagtgattctcctgtctcagcctcccgagtggctgagattacaggcgcctgccaccacgcccagttaatttttgcatttttagtagagacagggttttatcatattggtcaggctggtgtctctaactcctgacctcaggtgatccgcccgcctcagactcccaaagtgctgtgattacaggcgtgagccaccacacctggccagaaaaaaataaaaataaaaatgtatgcctgtaatcccagcactttgggagaccaaggctggaggatcagttgaacccaggagatcaagaccagcctggacggcatattgagaccctcatctctacaaaaaataagaaaaattagactgggccacggtggctgatgcttgtaatcccagcactttgggaggccaaggcgggtagatcacgtgaagtcaggagttcgagaccagcctgaccaacatggggaaaccccgtctctactaaaaatacaaaattagccgggggtggtggtgcatgcctgtaatcccagctacttgggaggctgaggcaggagaatgacttgaacctgggatgcggaggttgcagtgagctgagatagcgtcattgcactccagcctgggtgacaagcacaaaactccatctcaaaaaaggagaaaaattagccaggtgaagtcgtgcccacctgtaatttcagctactcgggaagccgaggacgaaggattacttgagccagggaggtcaaagctgcagtgagccatgatcacgctgctgcaccccggcctgggcaacagagtgaaaccctgtctcaaaaaaaaattattaaaaaacatttaaagagacagggtcttgctatgttgctcacgctggtctcaaactcctggcctcaaatgatcctcctacctcagcctcctgggtagctgggactacagagcgagccaccatacccagctactttgtgccttttgtaaccccagttttcaagatcagataaacacaaagtgaactaagacaccttctagacagagtgcgggcatgtgaacgcatgcttgtgtctatttttctgagtgtcacaatgcaaatagtatgcaaatgagtttgtgatgtgtgtccgtgtgcagacctgtgtgtgtacatgtgtgagagagagtatctgggtagataagcagatggatggatgagaatgagaaacctggagtttccaggtgcagaggaaactgttcctccagggttcttttttgagacagagtttccctcttgtcacccattctggagtgcaatggtgtgatctccgctcactgcagcctccgcctcccaggtttaagcgattctcctgcctcagcctcctgagtagctaggattacaggcgctcgccaccacgcccagctaatttttgtatttttagtagagacggggtttcaccatgttagccaggctggtttcaaactcctgacctcagatgatccacccacctcagcctcccagagtgctgggattacaggcgtgagccaccgcacccagcctcctccagggttgtataaaagcaggggatttggggagggagggaaggatgtgggtctgtcctcagtcccagatgtgggtgtggcgttccagtggttagttcccgttgcctcacatctgtgcttttcctccacggggacttgtagaagtagaagaacttcttgggggtggagctgaggggtggagctgaggctggagggaggaaggtgtggggggacccaggggtcctgtctccaagcctggttgctcttacgcgaaaagttgggacactgaggtgtcacagcttctcttttgaaatggagaggaggtaggagggtgaggtccatccaggtagacacagacacacacagagaccacagcttcctgtaacatttccgagtgtcgaattccatctcccggtctagaggtttttcttcttggtccttcctgagacctcttggctcccaagagcctcttgatcggggcaggaatgagggtgccccagggtgcgagagtcgtggatccctgaaaagaggaggctgctccccctctttcttccccccacctccagatttcctcatctgcccacaccttccggtgggcggggacgtgtatggacaaatttgcgggctggggaccatggaagtggaggaaatctacaagcaccaggaagtcaagatgcaagcaccagccttcagggacaagaaacagggggtctcagccaagaatcaaggttagggaactcgaggtggaagggaggggttaagaaggagagattggggggccgggggcttttgctcatgtctgtaatcctagcactttgggaggctgaggcgggaggattgcgtgagccctggaggtggagactggcctgggcaacatagggagactctgtctgtaaaaaataaaaataaaaaaagaaggagagttcagatgggagaggtaaggggtcaaaggtgggggccgggggctccttcccctccaagatgtgtggatgtgtgtgtggatgtgtgtgtggtgtgatcactcaaactctcacacacccgctccacttaaccaaaaagcagattttagcttctcactccttatctttcaccccctacaatttattgagtgcaaagggttgggtaaaacaagatcccggatccactctccacaccacagagctctgagcagatctccaacccctcccaggtgcccatgacccagactatgagaatatcaccttggccttcaaaaatcaggaccatgcaaagggtggtcattcacgacccacgagccaaggtgagcagacacccacctgctcacatcccatcaccttgggaaggggcaggtgggcgggcaactgcagggcccccggggctgcgtggaagggaggaagcgatggggaaggaagaggtgacagctgttgacgtgctaatgaggtctgttgatgatgacaatgttggggaatgctggagagggggtctgtgatggtgacggtgttagatcgctgagggtggctggtggtggcagtgttgttgacgatgatgacaagctgcatgaccacagctgctgatggttttgagaggagcgaggtgtccatggtgttagagacagtgaggatggtttgagtggtggtgctggcccctcaaggtcactttgctgcctctttgctccagtcccagcccagtgcaggccgccctcagactccacccaggtcccctgctggttgtacagagccatcctgagcctgtacatcctcctggccctggcctttgtcctctgcatcatcctgtcagccttcatcatggtgaagagtgagtacttcttgggaggagggtgctggggggcctagactttctcccttgtccttctctctctctctccctgggtgcttcaaggattttcctgcccctcctgaacagatgctgagatgtccaaggagctgctgggctttaaaagggagctttggaatggtgagcggagggtctgagggagacccgtggggtcatggtgggggtctggagagggatggatgcacagacacccctgtttcatgccctcagtctcaaactccgtacaagcatgcgaagagagacagaagagaggctgggattccgttcagcagagcatcaccatggtcaggagcaagattgatagattagagacgacattagcaggtgcctgtgtagtctcgccttctatgggggttatttgtcaccaatgcccggagctgagctgggggcaggggattcaggggaggagaaagccggggtcctaccctcccaaagctcaagttgtggaggggcgatgggtgttaccatctgggttgctctgtgggtattgaaaggctcctgggaaccccaaatccatgggctctgctgtaccccagggtgggtgtggggcagggggggtgcttccaaggaaggtgggggctttgtttgaggctccaccgcagcttgacttatctgttcccacccaaccctccccgccccctaggcataaaaaacattgacacaaaggtacagaaaatcttggaggtgctgcagaaaatgccacgtaagttggcgccccgacaggaggtggaggagggtgggtggggcttcagatttagccccagctcctctcccaggggcgggatctgcctcactgtgggtctctccccatccccagagtcctcacctcaataaatgagaggacattgtggcagccaaagccacaacttggaagatggggctgcacctgccaacgaagacgggaaatgaccccccccccccagcctagtgtgaacctgcccctcgtcccacgtatagaaaaacctcgagtcatggtgaatgagtgtctcggagttgctcgtgtgtgtgtacacctgcgtgcgtgtgtgtgcgtgtgtgcgcgtgtgttcgtgtatgtgcgtgtgtgcgtgcgcgtgtgtgtgcattttgcaaagggtggacatttcagtgtatctcccagaaaggtgatgaatgaataggactgagagtcacagtgaatgtggcatgcatgcctgtgtcatgtgacatatgtgagtctcggcatgtcacggtgggtggctgtgtctgagcacctccagcagatgtcactctgagtgtgggtgttggtgacatgcattgcacgggcctgtctccctgtttgtgtaaacatactagagtatactgcggcgtgttttctgtctacccatgtcatggtgggggagatttatctccgtacatgtgggtgtcgccatgtgtgccctgtcactatctgtggctgggtgaacggctgtgtcattatgagtgtgccgagttatgccaccctgtgtgctcagggcacatgcacacagacatttatctctgcactcacattttgtgacttatgaagataaataaagtcaagggaaaacagcgtcgctatgggacctgttactggggcaaggggaggggttttgggacctggggagagggagagtctgcacgtgacaatgaccccggggcaccagggtgggcgagactgagtgccctgcgtgagtacctgtgcatctgtgaatgagtaactcattccctgtgtcttccctgtgtcccagagtgggtgcccctgagcatacaacatctccctgagtgtacctgggaccacggatatatacaagccctaagcgtgtacccacgtgtgtaattgtgcccgtgagtgtatctatgccattgagcatgtatccatgagtgtacatgaccctaaggtactatgtccaccgctcatgcatgcacttgatttgttgttgttgttgtttgtttttgtttttttgagacagggtctcgctctatcacccaggctggagggcagtggtacgatcatgactcattgcagcctcgacctcctgggctcaggcgatcctcttgcctccgcctcccgagtagatgggattacaggttcacaccaccacacctggctaattttttttaaagaagtgggagtctagctatgttgtccaggctggtctcaaactcctggcctcaagtgattctcccacctccgcctccgaaaatgctggggttacaggcgggagccaccgcgggccacatggatgcacttgagacaattgaacccatccccaaggacataggagtgcctggaaaagccaacaggtgtgtccatgtgcaagggtatacattggcccattgtcatacgtgcgccctgagcaggtgactaggcctgcaagcgtcccctccagcgtgggccacccagagccagcgagaccctggccacgcgcggagcagccatcacggccgtgggccacgtccctgggtccggctccgcggactcgcgcgcccccctgcggccgctctcaggcaccgctgcgcgcgccccgcccacacgcctggcccgtcgagcgcctgcgcacgcagcgccttttacggcgccgtaaagcagctcggccgagcagactgctgcggttcctggtgagaccctacccacccccctgcccgcgccgggcctcgtccgctccccggccccttccccgcgggcgtgtgggtcccgggctggggtctcggcgtccgcgatcccgagcccgctcgcttcggcccccctcaggaggctgcgaggagggtgggtttctccccagtgtagaggtacggggcgagggtcgcggggccctgaccctacggcagttcagctcacttcagcccccatcgcagcccggtggtggggtcttaacgatccctctcccatctcgcgcgcccagggccctcgccacggacggatctgcatgctggggcgggggcggcccggagcccctgggacacccctccccgctggttctcccacctcccacgcagacctcgttggggtcggcttagcatccacacacctccccatgcatggtgggggcgggttctcagctgcccctccgatcccgtctcggcgcccgctccccaccccatttctcttcaggagccccctaccccatctccctctccccgcaccgacagctgatgggaggaccacagttgctcagcatccagcttcctttctggagagcacgggggtgggaggctcccaacacctctgggcccctcctcccagccttcagaacccaggcccatccgcgtctcaaaggacgaagggttcctgcgtgacacatcggagctgcctgcctgagggcttggggttgggggttacccgcccctcctgcctggccccacggatcccccctgttaaagcccccaaccctcctggcttttggtcttgacacgctcctaccccactcccaccctccaccccctttactctggctttccgcagggggccggcaggaaagttcccgagggtcgtctgtgctggagcgcagggcggggcaggagcgactgcccatatcccctcgtggtgcctcatctttgtcacctccctgccctagatctgacgcccctccccccatacactagttttctagttactcctgtaggtggcggagcgggcaggaaggcgctttcgcaattgaaccgtctgcatgcccgagggttgggtggtttcggcctcctcttctgttccccctcgtgtctctcctcccaccttgtccccactcccgctagcccgctgcctgccgagggtataagactcccccctcccttgatttatctggttacgtgtaatcgaggcgtgttttacgcgcatctctttgcaagtgggaagtcggcactggagcacacaacagtggcatgggtcgagggtgtcccagggcccctcgcggttctccctcctttcctcccggcctgctccccttcccattgcccctgacacctgcacttcctggtctccccgcagggtggcggcggcatggaggcgcgcttcacgcgcgggaagtcggcgctgctggagcgcgcgctggcgcggccgcgcaccgaggtgagcctgagcgccttcgcactgctgttctccgagctggtacagcactgccagagccgcgtcttctccgtggccgagctgcagtcgcgcctggccgcgctgggccgccaggtgggcgcgcgcgtgctggatgcgctggtggcgcgcgaaaagggtgcccggcgtgagaccaaggtgctaggcgcgttgctcttcgtcaagggcgccgtgtggaaggcgctcttcggcaaggaggcggacaagctggagcaggccaacgatgacgcgcgcaccttctacatcatcgagcgcgagccgctcatcaacacctacatctccgtgcccaaggagaacagcacgctcaactgcgccagcttcacggcgggcatcgtggaggcggtgctcacacacagcggcttccctgccaaggtcacggcgcactggcacaagggcaccacgctcatgatcaagttcgaggaggcagtcatcgctcgagaccgggccctggagggccgctgaccctgccggagataaaggatacagagagcccctccccacgtgtgtcttgtgtcttgtgtggcggccttagatccactcagtaccttgagccacagccctgccccaggctggggagggaggccaggtccgaatgtgtttacagtagagtgggggcgggtctggccatagggttggggggttgagtgagaccaggagtggtggggagaaataaacccggcaaaaggagttggtgggaaatgctggcaggttctggaatcacggttggaggctgtctgcaggctggagggggcatggggtcctgggagacgcatcaggctgagacagacgcctttagactgggggtgggcaaactgcgcaaagtgccagatgggcaatattttatgccatgtggtctttattattattttttttatttgttgagatagagtcttgctctgtcgcccaggctggagtgcagtggcaccatctcacctcactgcaaacctccaccttgggttcacgtgattctcctgcctcagcttcccaagtagctgggattacaggtgcctcccaccacacccggctaatttttgtatttttagtagagatggggtttcaccatgttggtcaggctggtctcgaactcctcatctcaggtgatccgcccacttcagcctcccaaagtgctgggattacaggcgtgagccactgctgtgccgccatgtgctcttgccccattactccgctgatgtactgaatgcaaccacagacaacatgtaaaggagtgggtgtcaccgtgtgcctagaaaacaggcagagggagattgtttgccttcttccctcatttattatatttttcagagacagggttttgttctgtcgcccaggctggagtgcagtggcagcatctcggcttcggctcactgcaagctccgcctcccgggttcatgtcattctcctgccccagcctcccgagtagctggaactacaggtgcccaccaccacacctggctaatttttcgtatttttagtagagacggggtttcaccatgttagccaggatggtctcgatctcctcacctcgtgatctgcccacctcggcttcccaaagtgctgggattacaggcgtgagccatggcgcccagccatgcccagctaatttttaaaaaatttttgtagagatgggggctcttattaggttgcccaggctggtctcaaactcttggcctcaagcaatccttccaccttggcctccgtaagtgctggggttacaggcgtgagccaaatcaaagtgtgttctgtagatcagcagtagcagcatcaactgggagttggtccataatgcagtctcaggcccaccccagagctgctgaatctgagggtgcattttagcgaggcccccaggggattcctggggaccttagattgagatgcaggctttagggtatcagaatcaccaggaggggccacgtgcggtggctcacgcctgtaatcccagcactttgggaggctgaggcaggtggatcacctgaagtcaggagttcgagaccagcctggctaacatggcaaaaccccgtctctactaaaaatagaaaacattagccgggtgtggtggcacatgcctgtaatcccagctacttgggaggctgaggcaggagaatcgctccaacccgggaggtggaggttgcagtgagccgagattgcaccattgcactccagcctgggcaacaagagcgaaactccatctaaaaaacaaaaaggtcaggcgcggtggctcacgcctataatcccagcactttgggaggccgaggcaggcggatcacgaggtcaggagttcgagccagcctggccaatatggtgaaaccctgtctctactaaaaatacaaaaattagctgggcatggaggtgcattcctgtagtcccagctacctaattttttgtatttttagtagagatgaggtttcactgtgttggccagtctggtcaatactttaaagttaattttaaagtccaggatgatacaaacacatttcccttgttaaaaaaattttaaaataagtggggtgcagtggtgcacacctggagtcccagctattcaggaggccgaggcagaaggatcgcttgaggccaggggttggtgtccagcctgggcaacatagtgagaccttgtctaaaagaatttgaaataaggccaggcgtggcgacttatgtctgtaatcccagcactttgagaggccgaggtgggcagatcacttgaggccggaagtttgagaccaacctggtcaacatggcaaaacccatctttactaaaaatacaaaaattagctgggcgtggtggcaggcacctgtaatcccagctacttgggaggctaaggcaggaggatcacttaaacctgggaggcggaggttgaagtgagccaagatcacaccactggcactccagcctgagcaacagagtgagaccctgtcttaaaaaagaaaaaaaaagtaatgtattacacctcaggcaattttcctttccctttttgttcaccacacttggttcctgataactcctcctctcccccaaggaaagttcttccagattttttgggggaaccatgatccaatcttccctgcttcctttccaccgccccccagaatgtgaacagacaggtctgttcagaaaaggaactgcagggactgtcagctgggctcccctcactggttatgagaagggccaaaggggtcggtgtcacctctagatttgtttaggatgctctgttggactgcctggtggaccagggctgagggcttggtcagggcagtctcagccatcctagcaagaggcattgagcagggtgggcttcagcacactggggagaaggtggcgtctctaggatgaatgaaaccattgagcaaccaccacacatagccccagggctgatcctggaatagctgttggctgttggaggtggagggaggcgccgggagagggcttgggcaggatgatagcctgaatctggaatgagggggaggcgtctagggggccagcagatgcacaggtcttggggtttggggtctggagttctggagggaggtctgggcgtctgcacagacacagaaaccacagtcctggatgggggacggagggaggggaacatggtgtctgagaagctggatttcagagcaaaatgcaggacgctttgggctaagcagccccaggcaggtcctctgagaccctggcgagaggggcttccagggccggccagggcaggggccattcttctgtccagaggcggggctgtgagggatgtcagagaaatcgggagggaggaagaggggctgcgggaatttgtaagctgggagtgcagggcccagggtctgttcccacgccccatccccaccggccaccgagggtgagttagggggcttgaggagaagggaaaacgtttgaacaagctgtagggttatgaggctgggcccggggttggggcaagggaggatgaagagaaagaagagcctgtggttcggcagcttctgatcacagcagctctaacttacggtgctctgggctgcaaggaaggtcttcccctggaccctccaggtgggtgggtgagaggaagaggaggaggaggagccaggcaccagcccttggtgagctgggcaagcagcatcagctcatttcacaggcaggttccaaaagaagtcatgtgcccatggtcacacagattaattattattattattattatttagagatggagtctcactctgtcgcccaggctggagtgcagtggtgcgatctcagatctcagcctcctgggttcaagcaattctcctgcttcagcctcctgaatagttgggactataggcatccgccaccacacccagctaatttttgtatttttagtggagacggggtttcaccatgttggccaggctggtctggaactcctgacctcaagtgatctgcccgccttggcctcccaaagtgctaggattacaggcgtgagccaccgcacctggctggctttttctcttttcttcttctttttttttgagacaggttctcactgtcgcccaggctgagagcaggggcacaatcctcccacctcggcctcccaagcagctgggaccaagttgcccatcactacacctctagtttttgtattttttgtagagatggggcctcactatgttgcccaggctggcctcaaactcctgaactcaagcagtcctcccacctcagcctcccaaagcgctgggatgacaggcatgagccactgtgcgcagctggctttggccttttatctgagctggaggaaacttctggaaagggggcagtgaagagagagccccgggcggaggtgactgctccagtcgaggcagtggcagaaggggtgagcagtgagtgattgtgagcgccgtttgacagcagagcccactggcatttcttatggtcttggacctggaggtgttgtcaggggaaagggaagaggtgcaatgaccccagtgttggcctgagccactggtagaggagtgtggagaggggaccctgtgctcctggcctccctcccgtggcctccggcatgggtcgaccttggccgagcgtgaggctggtgccacctcagcctcccagaccctgagtagggttaacacctccagacccgaaatggcctccggttgaccgggcccactccccatcagcctgtccagccagccagcacttactgagtgccttctgtgtactaagccctgctctgggtacttccatgagtcaactcacgccctcccggcctcagggtgatccaccgccttcccctacagtattccaaggggccattggacctcagaggcttcatgtcctgcacattctccgtgtcatagagcaggaaaaaataaaaacgggagatcgaattctacttcagttgctcctcaatttgtttcttttttcttcttttttttttttttgacatgcaatctcactctgttacccaggctggagtgcagtagcacgatcctggctcactgcaacctctgcctcccaggttcaagtgattctcctgcctcagcctcccgagtagctgggattataggcacatgccaccgtgcctggctaatttttgtattttttttttagtagagacggggtttcactatgttggccaggctggtctcgaactcctggtctcaagtgatcggctcaattcagcctcccaaagtgctgggattacaggcatgagccaccacatctgcttgctcccaattttctttctttctttttaaatttatttagttggggtctcgctctgtcacagtggcgtgatctcagatcattgcaacctccacctcccaggttcaagcacttctcctgcctcagcctcctgagtagctaggattacgggtgtgcaccaccacgcccagcgaatttttgtgtttttgttttttttttttttttgagatggagtctcgctctgtcgcccaggctggagtgcagtggcgcaatctcggctcactgcaagctccacctcccgggttcacgccattctcctgcctcagcctccccagcagctgggactacaggcacacgccgccacgcccggctaattttttgtatttttagtagagacggagtttcaccgtgttagccaggatggtctcgatctcctgaccttgtgatccgcctgccttggcctcccaaagtgctgggattacaggcgtgagccaccgtgcccggctgaatttttgtatttttaatagagacggggttttgccatgttggccaggctggtcttgaactcctgacctcagatgattcgcctgccttgacttcccaaagtgctggaattacaggcatgggccaccacacccggccaaagatctgatgtcccaactttcaaaggtggtctcaggcatcagactctggaattcccagctcccatgtgccacacccagagaccagacccagccaggcctccaagaaggggacaaatgtgggaggccatcactgccccattttattgatgcaggctggacaggaggactcaccacctgagctggggatactcaggtcctggggtgctgaggagatggggctgcatctggagagggtgctgttggggtgtactctcatctggagagggtgctgttggggtgtactctcatctggagagggtgctgttggggtgtactctcatctggagagggtgctgttgggggcactcccatctggagagggtgctgttggggtgtactcctgggaaggcaggggccatagaggagcgggagatgtgtcagctgcctccgtttgggtggcagaaaatgtcacagggacctttcagccacaaagaggcttttaggccgtggttgggggtcttcagggtcttgctctgggcctggctgtatccatgctcaagagtggagaggggcagagggggtgggcaggcggccgtcagggtctggtcttgaatcaggtcccatggactccgcggaaccttcgctggctggcggcgtgcatgtggccagccggtcgcacacccaggcgcccagcttacggtcgcagaaggcgtcgttccagcgaccggagccccgcatcatcacgcagtcctcgccctggctccggctggtgggctcccctggagcccagttgctggagcaaaaggctttgggtcaggggatggggcggggagaaggagcccagttcccggcagccctctgagtctgcaccctcccttctcaccccaggttccccatcctgagtctgtgcctggggaccggtacctcattttggtgccccataccctgcagcccaagactcacccttatttatttgtttgtttgtttatttatttattttgttgagacagaatcactctgtcgcccaggctggagtgcagtgcgcgatctcagctcactgcaacctccgcctcctgggttcaagtgattctcccacctcagcctctcaaatagctgggattacaggcgcccgccatcatgactggctaatttctgtatttttagtagagaggggtttcgccatgttgaccaggatggtcttaaactcctggcaggtgatccacccacctcggcctcctacagcgctgggatgacaggcacgagccaccctgcccggccaagactcacccttctaatctgtgcatggaacttcctccctgagccccttcctctatatcccctcctccaggtcagagaagccttggccaggtcccccagcccccactggcgtccttctcccctgcaccctagagacccttatctctgagccctcatccgctttccgatgcagtttatctagggagctcctccctccacggtatttccatctcctcccctggatcccagaggccccctcctcacctgtagtccacgtggctcccatccacccagataaactcccccttcaggtccaagttccgaaggccaatccaggagccggtgtggctggcatgcttggtcaggaagtcctgggggacaggacagggctggaggactggagacatgtgcccggggccttccagcccacttcgagaggttgggtagagtggggtgggggtccccccaccctcgccatgctgcccaccacctctgcagagccccagcccacctgctcctccgggctgtggatgctgaccagctgcccttccatgtcgtcacaggcataccgggcgtggacccactgcttggtgcccttgccgaagtagtagcacttccgttggaaattgatccacttttcagggcacgtgttgcacacaaagcctggggtggaggagaggctcgggggtggggccaatggaagtgccttgggcaccctgggcagactaggtggcagcacccctcctagggccactcctggggtcccggctaaaagcagacccaccccagggcctaacagacagcctcacgggctgtgttctctgctggagctatgatgctgaccagatccatagtagaagcacctcagccaccatggccacaaacaccttcatggttagcagagcacggtgtcgaccatcaacacctcaactaccatcagcatctccacaaacacctcatggccagaagcaccacaagcaccaacactgccaccacacattcatgtccaatatggtcaacaccatgaccacaaacacactcatgtccaacaacacttcaaccaccatcaccacagacacctcacggctagaggtccctcaaccaccagcaccatgaccacaaatgcattcacgtccaacaacgcttcaaccaccattatcaccacagacacctcacagctagaggcccctcaaccatcaacaccatgaccacaaacacactcatgtccaataatatttcaaccatcgtcataaccacagacaccccacaggtagaagcccctcaaccgtcaacaccatgaccagaaatgcattcatgtccaacaacacttcaaccaccagcatcatcgctacaagcaccaccatggccagaagcacttcagttgtcattataatcaccttaaatccaccacggcttgggaactcttcagtcaccaaagccatgaccacatcaccggctccacagccagcagcacctcagccacaaatcccatcatcacaaatgcttcacagcgagcagagcatcaatcaccaacaccatcgccatcgacagctcatagaagtgcctcaatagccaccaacatcaccataaatccatccatggctagcaacacttcaatcaccaacattatcacccacatcaccagttccacagccagcagcacctcagccacaagcaccatcaccaacagcactttcaccaccctcatcacctcaaacacctcatgccagcagcacttcaaccaccaacaccagcaccacaaatacctcatggccaaaaatgccaccaacaccatcatcacaaatgccttacaggcagctgaatatcagtcaccaacatcatctccacaaacaactcctcaaccaccattacatcatcataaatacacccatggccagcaacacctcagtcaccaacaccatgactacattgccagttccacagccagcaacactgcaactgcaaacactgtcaccacaaacacctcccaactagaagcacctcaaccaccagcactatcaccacaaatacattcatgtccaacaacacatcaactaccaacaccattgtcacacattcacattcacgtccatcaacacatcaaccaccaacaccatcagcacgaatacattcacgtccaacaacacatcaactaccaacaccatcaccacgagcacattcatgtccaacaacacatcaactaccaacaccattgtcatgaacacattcacgtccatcaacacatcaaccaccaacaccatcagcacgaatacattcacgtccaacaacacatcaactaccaacaccatcaccacgagcacattcatgtccaacaacaaatcaactaccaacaccactgtcatgaacacattcacgtccatcaacacatcaaccaccaacaccatcagcacgaatacattcacgtccaacaacacatcaactaccaacaccatcaccacgagcacattcatgcccaacaacacatcaaccaccaacacctttgccacaaacacattcatgtctaacaacacatcaattaccaacaccagcgccacgaacacattcacgtccatcaacacatcaaccaccaacaccatcagcacgagcacattcacatccaataacacatcaactaccaacaccagcaccatgaacacattcatgcccaacaacacgtaaacccctaacactgtcaccacaaacaccttacagccagcagaacgccagtcactaacaccatcgccatcagcacttcgtggttagcaacacctcagctgacgccaatgtcaccacaaacacctcatggccagaagcagctcaaccaccaacaccgttattataaatacattcttgaccatcaatgcttcaactgctgacaccattaccataaatacatccatggccagcaatacttcaatcaccaacaccatgaccagcagcacgtcagcggccatcactgtcaccacaaacaccttcatatccaataacacttcaaccaccatcatcaccacaaacacctcatagccaacagtgcctcagccaccaaccccatcatgacaaacacctcatggccagcagcacttcaaccaccaacaaacccctccaaggtcagcaacaccttcatcaccgacatcattaacagaggtacccaccaccagcagcagcttatctccaccacccacaccacagccaacaccatctttaccaaccacaccagccgtgtcttcatcactggcaccgacagcaaaaccagtgctgtggccaggtccaccagcgattactttccccaagcaccatccctaccaacagccctggtcatcatcactggcagaacccgccaaaccagcactcctagccaatgtctgggaaattgtgatgattttcttccagtgggaggctttggtcaggagagccaatgggattgcaagactaggtcccacaatccctcaatatggtctctttctccccttccccccaccgcagtgaaactcccagacattgttgctatcgcctcccaggtggaaggttaaacccactcttactggatcaaatctttcttgcttcaaaatagattttcagcagtggtgtgcacctgtaatcccagctacttgggaggctgaggcaggaggatcgcttgagcccaggagtttgagaccagcctgggcaacatagcaaaaacccgctttaagtaagtaggttttcctatagtgatatgcagggaaggttccactacacgtggtcagatgttttttgttttgttttgttttgttttgagacagagtcttgctctgtctcccaggccagagtacagtggcgctatctcggctcactgcaacctgcacctcccgggttcaagcaattctcctgccttagcctcccaagtagctgggattacaggcgtgcaccaccatgcccagctaatttttatatttttagtagagacggggtttcaccatgttggtcaggctggtctcgatctcctgacctcatgtgatccacctgcctcggcctcccaaagtgctgggattacaggcatgagccaccatgcccagccacagatttttttttttttttttttaaagaggcagggtctcatcatcttgcccaggccagtctcgaactcctgggctcaagtgatcctcctgcctcggcctcccaaaatgctgggattacaggcgtgagccaccacgcccaccctcacatggtcagatttttctaaggagcttagggtctgcagtagcttgagatgagtgtgcttctcacccatgaaatggtaaccagtactcagccctctggaggtgcagcgttaaaacaggaagaggtggccaggtgcagtggctcatacttgtaatcctagcgatttgggaggccaagatgagaggatcacttgaccccaggagtttgaggccgtagtgagccatgattgtgccactgcactccagccttggtgacagaaccaggccctgtctctgaacaacaaaaacaacaacgacaaaaacccaaaccccaaaaccaggaagaggacatttctgagccctcaaagaaaacttcaggggaaggtgtcttggttgtttgttacatagtcacccagagacaacctcagagccaggctcagatcccaggctgtggggctggatttcggggagacttcagggactggggaagaattaggaggtgacctgtcagaagttgtcatggtccagagtgctcttcccctgtgcctctccctgagggaccacactgaggtttctggctgggattcccaaagccacttcacatcccaggggatgggactccatcacaccaagcacagaaacttcctcttctctgccccagttagggcagctggggcttcccagaggtcaaagaccaaaaatcaagggtgggggcattagctggcggaacggcagggctgtaaaaccccagttcctaccgtacagtaattttttttttcttcagaggcaaggtcccactctgttgcccaggctggagtgcagtggctcaatcctagctcaccgcagcctcaaactcctgggctcaggtgatcctcccacctcagcctccggagtagatgagactacaggtacacatcaccacatctggctaattttttcatgtttttgttgaggcaggatcttgctgtgttgcctaggctggtctcaaactcctggactcaagtgatcctcctgcctcggcctcccaaagtgctgggactataggcgtgagccagtgcacctggtccctaccccacattaagggtacagtgactgaatgtctgctctctctgcagcctgctagcctcctgaggtcaacactgcctccattactgccacccctgggaaagaggccaccatctccattgtcccatcactgcagacattacccccgtctggctccctgccctggtcagacaatctaccaggaaggctatgtgtatgagaatcctactaataactcctcactgggccacatcaggcagaggacaccagcaaggagaacccagcgagggtcaacactggactgctttaacgcagaagaggaaaaaaattgtaggagtctccaaatctgtgaaaggacacagttggaatcagaaagaaattgccaggcaagatggctcatgcctgtaatctcagcattttgggaggccgaggcgagaggattgctggagcccaggagttcaggaccagcctgggcaacatagcgagatcctgtcgctacaaaaaataaaaaaattagctagggccaggtgcaatgacttatgcctgtaatcccagcactttgggagactgaggcggaatgatcgctggagtccaggagttcaagaccaacctgggtaacaaagtgagacactgtggctacaggaaaataaaaaattagcctggcgtggtggcacacactcgtagtctcagctactctggaagctgaggtgggaggatctcttgagcccaggagttggaggctgcagtaagctatgattgcaccactgcatttcagcctgggcaaaagagtaagactccatctctctcttttttttttttttttttttttttgagacagagtctcgctctgttgccctggaatgcagtggtgcgaagacagcatgatctcggctcactgcaacctctgcctcccgggttcaagtgattcttgtgcctcagcctcccaagtagctaggattacgtatgcccgccaccacacccggttaattttttaaaatttttattgagatggagtctcgctctgtcgccaggctggagtgcagtggcgtgatcttggctcactgcaacctccacctcccgggttcaagcaattgtcctgtctcagcctcccgagtagctgggactacaggcacgcaccactacacccagctaatttttgtagttttagtagagatgggggtttcatcatgttggtcagactggtctcgaactcctgacctcacataatctatccgcctcgacctccctaagtgctgggattacaagcgtgagccaccgcgtccagctaatttttgtatttttagtggagacggggtttcaccatgttggtcaggctggtctcgaactcctgacctcaggtgatccacccgcctcggcctctcaaagtgctgggattacaggtgtgagccaccgcgcctggccaagaccccttctcttaaaaaataaaataagcggtgttttatgtatgctctgtgtgtcctgccccatcagaaacttagtcctatttccgtcatcacgcacacctctgcctcgcatccaagcacactccccaccctgcgcttatatctttgtgtcctcccgatgacactcgggtcacacaaacgtatagacatgctgcctcacgtcacacgtgcgtgccgtcacatttgccaacacgcccgagccccaggtgaggtcacgcgtcgtcctgagcagagactcacacactcaccgctggacacctgcaactccatccttagctttgtcacctcctcccggagtctttccagcaaatctgaagcttcgttcctctcgttcaattcttggggagtcaacaaggggcggtgctcagagaccaactggcaggccccctccttgtccgttccctcccccactgccccatcccctcccaagcctcaccctgggacttgaagctgctcagatctgcttgaagcccgttcaggttccaggacagctccaagtctggtgtgtgcaggagcgcagggctggtctcagggaggatgtgtacaggccgagggtgccccccaagcctggccccccagcctcgtggttccccagggctctgagacactccctccttcccacccaatctggcttcataaccccgatcccagtctctcaccctgagatttcaatctctgctgttcagctcgaagttcctccagttcctgtgaaatctgcgtggctgtttgcaggggagggggcttcatggtaagcaggtcctcattgtctcccccatctacccccacccatcccttggtctctttgcctgggttcttggaaccacctgctcagtttgcagttcccgggtgtcgggggtggggcacagtgagtcttaatgctctgggtccaggaagtcatccaagaccccctcgctttttcccctgcaaccccaactccaggagtcactcacactgggatttctgcgccatctggtcaccgtggtggctttccaagttcttggaaacttgagagactggagcggcgggagagaagagatatcccaggaacctcaaaggcaggtccttggaccccgcctatgccccaggctcagggaccctctcacatagtcacaacagctgctgttgctgtttgttcatttactggagcaggaggagtgtactcaggaaggtatatgcaagaatataatgaactactgtgtacctctccctcacccagggttaactataaaagcagtaggcgactatcagggtacttcacaaatcttagagcttgtttctgtctcacggcactaaaagtatgcccattttacagatgaggaaatggaggcacaaagcagttacaaaatccttacactacagatgcttaaggctgccaacttacaatggctcaacttacaatagctcgagttacaatggctcgactttacaatggtctgaaaccaatatgcgtttagtggaaaccttaactctcttgcaatgctgggcagtggtagggagccaaagccttcagccagccacacagttttgacttaaactattttcaacgtactttgcgcttatggggacataaccccattgcaagcggaagagcatctgtattaggatgctatcaggcacttttccaagcttccctgggtccccgccttccctaggacagggagcaacttagtttgaccttcagttccttagcgaggggacactgaggcccagagaggagcgggatgagtgctgggcatcctaaccctcacccccaccccctccaccttgaccccttcataccgttccgggcagccctctcttccagctgttttagactctgtgtggtgtcccagtctggggagggggagagaagaggagtggagaggggggattgtcagtgcccccacctgcctgcaccccacctcccagctggggatggaggtcttgggtataagccatggaggtgctgaaagtgtggaggacagggatgctgggtgtggggtgaggggctctggagggtgggggatgggaaagggctggcagtggcaagatgggaggcaggatgggaaaattgggttttgagaggatgcgttgggctcccccagctctgagatgggggtgaaggagggaacacagaagggccccatgagttggggggaccacatggagctgggggtgtcctcacgccacaggagaagcagagtcagcagcccagcccacagagcggcggtcaccagccccagcagcacgatctgagtcccacgcctgcaacaccgcctcctgggaagctcctcgatctctgccgggggtggagggactgactatgggtgcagggtgaagctggatgctggccctgtccgtctctccattacccagagcccccgacagcctgggagcttgtccagagcccacactgaagcaaagggtctcagtggacccccagctccatttgcacagcttccttacctgactcagggctgggtcactgaccacagagacagatctgggactaagagctaagactccctcagccccaacaaccaatgccaggcccccagcttcacttccagaagactaggtcctgctttttccttcccctctgagccccaacgcccacccttacacctctgcacctgtccccaacctggagtcccttccctaaacccaggacactgagtcccagttcttccccaacatcggagccactccccagccactttcccaggtgtcatccaacatccagacctccaaacctctcccagaccccacccaaaggtctatctggatgtcccacctcaagcccctggccctctgcactcaccctggcttggaggattcattatgctaaattctgcttgttccaagttcctgttctatttggcctctgactctattgggctccccgctccctagctgaagccgtttttttttttttttctttttctttttttgtcaggagggtgttgaatcagaaaaaggaggggccctcaatttgccactccttcctggctctgtgccaggaaagtcagtccggcctcacctccttactcacaccagtccctttcttagaaattcaccctctttcccagagagggactggggagccccgcttctcttctgggtgaaaggcagtagctaagggtcattgcttctgccaacgttagaaccagagagtcctcctacctgaatattgaccttcctccatggcggtcctgcttggattctcccgatgatggagcactcactccctgacaacgcagtccactcagcgggcacaatcacagctctggctgatttgggatttaatgatggttagggtgagccatcaaatcctagttaccagcacaggatagcatctgggacttggtggcactcaggggccatttgctgattttgtttagtctacaatctggactcactagcgtggttagcagggagacacagctggtgtggagagatagcagcctgagatcagaagtggggcactccagagcccatcacacttgagctacacagcaggtgcacccatgagatcttgacaaatggcttaattaacctggaaacttctttcctcattcgtaaaatgatgataccaagaacacctatactgttggttggtgatctgtgctaaaaatatcaccagcgtttattataattgccttgcctgtgtgacctcagccaaggattcaaccattctcagcctcagttttcccctctgtaaaatgggctgatgacagcacccaactcatgaggccaagataggatccaatgagatcacagcatacctgaggtttttggtgccgggctgcgcacagtgggtcttcggattctaaacatttatgaaacatctactctgtgccacgtcccactgagaaatgctaagagcccataacccaggcctcagccttctcctctgccaatgtccccagggcatctgtaaagtgctctgactttatttatttatttatttatttattgaaatggagtctcgctctgttgcccaggctggagtgcaggggcacgatctcggctcactgccacctccacctcctgggttcaagcgattctcccgcctcagcctcccgagtagctgggactataggcacgtgccaccatgaccagataatttttgtatttttagtagagacgggttttcactatgttggccaggctagtctcaaactcctgacctcatgatccgcccgcctcggcctcccaaagtgctgggattacaggcgtgagccactgtgcatggcctatttttttattttttgagatggagtctcgctctgtcacccaggctagagtgcaatggcaccatcttggctcactgcaacctccacctcccgggttcaagcgattctcctgtcttagcctcccaagtagctgggactacaggcacccaccaccacacctggctaatttttgtattttagtagagacagggtttcaccatattgatcaggctggtctcgaactcctgaccacaggtgatctgccctcctcagcctcccaaagtgctaggattacaggcgtgagccactgcgcccgaccaagtcctctgactttaaagcatctactatgtgctgaggagcatgggacttggggtccttcaggcctggaggtcacgggctaccttctttcgctgcttgactataggtaagtcccttctctcggagcctcagggaggtggggtgtggcgcggccaggctctgattagcggcagctcaagctggcccttttgacattgtgagaggaacccagagaccatcctgggactggaactgtccagggaggcagctggacagacctgagtccgagtcctggcttcttcctggatgagcagctcagtttgctcatctgtaaattgggagtattcaaagcaccagcacacagtaggtgctcagtaaacctactggcaggatgctgggggactgtcctcattctgtggggcctctctcagtggaactgaggttccaagagggtaagtcatttgtccccatcacgcagtggtgggactggaactcaaacccgggacccttgagctgggagcccatttgctcaatcatctggagacataatctcatggtggggtgtctactggtaagtgctgggtggcaggatcccaactccaggccgtccttctaacccaagaggtcctgcctctgcctagagtcttccatggctccccagggccctctatgatcggcccagcgcactcaccaagctcatctcagaccagatggcctgctttcacttccccaaatcagggactcgaatgcctcgagattctgtccacactgcggcccccacccccgccccctcaccacccaccacctcccttctctggttgtgacctcctgctggtcatcccttgaggctcagcccaaggtcgtttcttccaagggcgctttgatctccacttcccatggccaacccccaacacaccagatacgtactcacttagtggagtttggagcctgtgtctgtcctcctagtgtgttggggtcgaccagagcgattggcagggaccgtcagagacagaggtttaagcaggaagagagacactttcttctgaaagtagagccactgacagcttctattttcatagacctaaatatgggcttgccacccggataacattacacgcatggcctctcctggtgctccccacacccgggtgaagtccgtgttattattatctccatttctcaggtaagagaattgggtgagaactagagatgttaagcagcaagttcccacagggctgaaggaggtgagtggtagcgtcaagatgtgaaccactgttactgcacactgaatcataccactatggccgatcacagagggccctggggagccacggaaggctctaggcagaggcagggcctcttgggttagaaggacggcctggagttgggatcctgccacccggcacttaccagcagacaccccaccatgagattatgtctcttgatgattgagcaaataggctcccaggtcaaatgtcccaggtttgagtcccagcaagaaaaaagggaagaggagagagaggcagaggaaggggaaaaaaaagacagaaggaaggagagggagaaggaggagtaggagggaaggagggaagcggggggaaagaaagatacgtgagataatattcaggtcaaatatggacagttttggctgggcacggtggctcacgcctgtaatcccagcactttgggaggctgaggtgggaggatcacttaagcctgggagttcaagaccagcctggacaacatagcaagccgttgtctctacaaaaactataaaaactagcagggcatggtggtgcatgcctgtgatcccagctactggggaggcagaggtgagtggatcacttgagcccaggagttcaagatcagcctgggcaacacagtgagatgaaagaaagaaagagagagagaaagagagagagagagaccgggcacagtggctcacgcctgtaatcccagcactttgggaggccgaggcaggtggatcatctgaggtcaggagttcaaggccaacatggtgaaaccctgtatctactgaaaatacaaaaaaaaaaaaaaaaaaaaaaaaattagctgggcatggtggtgggcacctgtaatcctagctactcgggaggctgaggcaggagaatcgcttgaatccgggaggcagaggttgcggtgagccgagatcgcgccattgcattccagcctgggcaacaaaagctaaactctgtctcacaaaaaaaaaaaagaaaagaaaaaagaaagaaaaacagaaaagaaacaccaaactccatcccagccccatcctggaactaagacttcatccccatgtcctcacaacatggcccagctggacttattcccaagcttcctcctccttctcctcgtgtgtccccattggtgggacagtccgtccatccacccagacaccccggcccaggtccaggccttgtccaagcacttcccgatcttccaccccaccgctcacccagcacccgcgcctggctcgtctcaaaaaaataacctgcttctccccatccccacagctgctccctcttccccctggaccaggtgacatccccctcttagggttccccctgcctggtttgccttgtccctgggactgcctcctccatggcctccccactctcatcctgcccccatgacagccttccctggggctctacctcctgtcttgccccccaaaacagaccctccagggtcctcactcccacctggccaccacggcagacccccccttaggatccccaacccgacctgccctcaagactaatcccccagtgaccccaccctggcttggcctcaaatgctgtccctatgtccactcagcagcccccagccacctctccaatgctcagcggccaactctttcccttcctttttgattttttttctttttttgagacagagtcttgctgtgtcatccaggctggagtacagtggcatgatctcagctccccataacctctgcctccccggattcaagtgattctcctgcctcagcctcccaagtacctgggattacaggcacgcgccactacacctggctaattttttgtatttgtagtagagatggggtttcaccaagttgaccaggctggtcttgaactcctggtctcaagtgatccacccacgtcggcttcccgaagtgttgggattacaggcatgagccaccgcacccggaccctccctcacttctttaccatcttggtcctcggccattaccccagatcaaggtggaggggacattttgggacccaaaatgaacagcctcagaccaccagagtcagtcattcactcaacaggcatgcaccaagggtcactcggtccagggtgacagacaaggcagcatggtcccagctgttctggagtgcagggtccaggggacatttcagccaggcccctccctgacacagtgggaacgtccagccctagtggatggcccagcccagccccctcctggttgggaggtgggttgtaggggcacaggggggtgtcttctggagtgagagacatgggaggtagcccacccaggagtggggatttggagttccccagttgagagtggggagggtgttaaggatcaggggacacattttgggaaggatgaggagggtgggcaaagtgccaaggggtcttagtatatagaagtctaggtggcatagtggctagggctgcagatgcctgacccacactacctgtgttcaaattcctggttcttccattgaagtgctgtgtgacctttggcaagtcacctaacctctctgtgcttcacataaggcagcattgatcaccaaagcatctaattcctagggtggtggtgaaaattagatgtgttaatatgcacacaagtcactaagaactgtgtccggctgggcgtggtggctcatacctgtcatcccaacactttgggaggctgaggcgagtagatcacctgaggtcaggagtttgagaccagcctggccaacacagtgaaaccccgtctctaccgaaaagtgcaaaaattagccagaagtggttccaggtgcctgtaatcccagctactcgggaggctgaggcaggagaattgcttgaacctgggaggcggaagttgcagtgagctgagattgcgccattgcactccagcctgggcgatcccaaaaaacaaacaaacaaacaaattcctgtgcccagcaaccattgctactaaattaaactatacaacaaaattgtccatatttttttttagagacagggtctcgctctgtctcccaggctggagtgcagtggtgcgatctcggctcactgcagcctcaacctcctgaggttcaagagatcctcctactttctcctcctgagtagctgggaccacaggcacgcaccaccacgcctggttaattttttaaatttttggtagcgatggggtctcactatgttgcccaggctggtctcaaactcctgggctcaagtgatcctcctgcctcagcctcccaaagtgctgggattacaggcatgagtcactgtgcccagctggaatttggtgtttctgagttctacaagcccaggtgccccagcccaaccccaccggccccatcatgtccttcccaggggtgaaagccccctgcctgctgggttcctgccaagactcagctcaaacactaggatgctttggggccccaaggacccagtcacgggactgccccacccgcttcccctctgcggtattaatacgcctcttgctcacttcgggggaaaaacagaaaattgtgcggatgtgggccccagatctgtgggtgtcggttcttctttcagatttgggatcctctgcatgttgggggaggccgcgtctcgctcctcgtttgacctaggtcagaattcaacaggaaggagtttagggtgtccagcaacaacaaccctcaaccatctccagctgagctctcatcccagccccggccctgaccgtaaccccagctcaactacaacttgatcccctcaccccacgatgctctgatcccagccctaacctctgctctgcacaggacggaggcacgtccgcggctctaatcacagaacccccacacctgggacagggcctggcgctgtgtcccaacgagatggagcctggcgaccctgactctaaccccatcccgacacagccctgggctttcctacctgtttaacctctcctggggttacgaaggggagaaggaaagggtgcaggggtggggaggaagggcagtaggtgtgtcaaatccaggggggcttccaggaggaggtgtgttcaaagctgggtctctcccaccctgcactgttgactttgggactgatgattcctcgctgggatgctgtcctgtgcattgttggatgtttagaagcatctctggccactagtcgccgaaagagtcaccgtggttgagaagcgctgctttgaaaacatgattcctagatcacgctttattttgttttcattgtggcaaaatatacataacataaaatttaccatcgtagccatttctaagtgcaccattcaggagcatgaaacacattcacactgttgtgcaaccattaccaccatccgtctccggaactttctcatcttcccaaactgaaaccgtgtccccatgaaacactcactccctatttacccaactccagcccccatgagagctccccttagggtcctcacccccaccagaccttcatgacagcctcctttagggtctccctgaaacccctcctctgtgtcttccctgaacggcaaccacctgcccatatcttctctctgcctacaaccatccatggctcccttctgccctgggcccaaagctccagcttcccatgtcctggagttcaagggtcctgcctgctcaggcctggcagctggtctctccagccacgcccatacctcttcctccaagactccacagagtgccttaacttcacacagttctgaaacaccaggctgtctccaagccttcgcacgggcagctgctgcctaaagtgctgagccaacccacagcaccaatttgtatggaagcctccctgccacccatagtcctaaggccccctcttttcccagccttgagctcctgcactggatgggcccctcctgggactgggggctccccaggggcaggacctatgccccactcctagaagggccaggagggcggccctgaatcacagtcacatgcacccctttccctccgcttccggacccccactcaggcagagagccagtcaacaggaagaggaaaggggtgtgtgggatgagaagagcctggatgtgcacttttgtcttccgggaacctcgggatctggagcccaaacctaggctgtttttttggtgtggattgtggcagtggggtggggagagcttgggggcactggtatgtgtggctgggagtcctcaggctaagaggggacgcagagatggggttgtccacacccttccctccagagggccccccagaactccaggaggggggtcctggaccactcattgcctccctgccccctcccctcaaggccccaggatacttctagggaccagagagctgagccagcaggtcctgaggcttctgagagcagcccaggcccagcctgggagatttggggatttctttccaagaacgccctcagagactctgaaatcctggactccgggctccaccctcacagacccggggcttcaacttcctggagacccaggaagccaggcccccagaccccaccctcagggactcaggctcagttccctaaggatcaggaagacaggcccccaaaccccatcttcaggaactcaaattcccagcccttcagggacccaggaggttgggactccagcctctcaatccctgagagaccaaagcctccagccccatagggacccaggaagccaggccccaagaccccatcctcagggacccaggcttagcctcttttttttttttttgagatggagtctcactctgtcgcccaggctggagtgcagtggcgcgatctccgctcactgcaacctccacctcccaggttcaggcgactctcctgccttagcctcccgagtagctgggattacagtcacccacgaccacaccgagctaatttttgtatttttagtagagatggggtttcaccaagttggccaggctggtcttgaactcctgacctcaggtgatccgcccacctcgacctcccaaagtgctgggattacaggcgtgagtgaggcttaatatcttaaagacccaggaatccaggcctccagacctcatcctcagggacccaggcccccagaccccctagggactttggtgtgggatcgtgtgtttttctcctccgtccctgctgatctcatgccggtttctgggtctgccaggacagtggcgggtgctgctgctttgctggacacacctggtcactgccaccactgtgtaacccctgatgtgggtaactaaaggccatgggttcccagcccagctgcacccctttacctgctgtgtgacttaatcctctctgggccccagtttcctcatctgtaaaatggggataacctcgtctgtaaaatctctcacataggttgctgtgtgcgtaaagccttcagcccaatgccagatatagggaggctctaaaaatgggagcatttttagtgcaatttcctgaaaaatatctctcacataattaagcagctcccaatccggcagccagcaaggccctgtgtggctgacaccttctcctctgtattgccccctctgtatgcccctccagtgacaatggcctgcctttctgttttatttttggagagatggtctcactctgttgcccaggctggagtgcagtgcagtggtatgatcacggctcactgcatccttgacctcctgggctcaggcgatcctcccacctcagcctcctgagtagcttggaccacaggcacatgccacctgcctagctaattttaaaattattttgtaggccgggtgtggtggttcacgcctgtaatcccagcacttttggaggccgaggtgggcgggtcacgaggtcaggagatcgagaccatcccagccaacatggtgaaaccccatctccactaaaaatacaaaaattagctgggcatggtgacatatgcctgtaatcccagctactcgggaggctgaggcaggagaatcacttgaacccaggaggcagaggttgcagtgagccgagatcgtgccactgcactccagcctggcaacagagcaagatctccacctcaaaaaaaaaaaaaattgttttcttgtagagacgagggtctcgctatgttgcccaggctggtccccagctaccggccttaagcaatcctcctgcctcggcttcccaaagcgttgggattacaggcatgagcccacatgtcctgctcttccttcatcttcacagccagaagcacagcctcttccaatctctctctgactctcatcctcctgcctcctcttgtaaggactctgtgatgacattgggccacctggataatccagagtgatctcccatctcaagacccttaacgtaattccatctgcagagccccatttgccatgtaaggtaaactgttcacaggttcccgggattagaatgtggacatctttggggaggtgttactcagctgaccactataccctaggagacagatgttgttattattattattatttgtttttgagaggagtctcgctctattgcccaggctggagtgcagtggcctgatctcggctcactgcagcctccgtgtcccaggttcaagcgattctcatgcctcagccttcacagtagctgggactacaggcatgcaccaccatgcccggctaatttttggtagagacggggtttccctatgttggccaggctggtctcgaactcctggcctcaaataatccacccgcctcagcctcccaaagtactggggttacaggagtgagccaccgtgcccggcccaaactctgggctttttgttggcatctgctacattcatccttttgagctgtgtctgactctggggacacgggaaaggtaagaatcctcatggggtttgggggacaggcctgacgaggagactctgtctgcccccgcttctttggagagcaccctggggacttccccacactccccagccttcctaggaagaagccctcgggatctgagggggtttcctgggatcagggggagaggggtgggaggctgataagaacagactactctgtctgaaagacatgactttggaaagtgggatcaccatggagctgctctatccaggaaaccctagctgggctccaaggtcaccagcaatttgctgaccgagccccagagagagttgccctgtggtcactcagggggctagtggtggggacaccccgtaaaaagaatcagggagtggctggaaggtgcccctctctgcctccatgccctgctttccagcacaaacccccattggtctcttcagggcagagcctactttctctccctgtaccccactccccaggccggaaatgccgtggagggggaattgcttttccagaattgttcatgtcagacctcaccacgtgggcacaccctctatctgtcctcaccacctcttcctctctctgccagactgtgggccccaggagggcagcaaccatgacctgaaccccaacatttcaccatgacaattttcttttccttccttccttcctttctatctctctttccctccctccctccttccctccctgcctcctttctttcttcctttctttcctttttctttcttttcttttcttttttctttcttcctttcctttccttaccttaccttatgttacctttcctttcttttcttttcttttctttcgtcagtctcgctgtgtcgcccaggctggagtgcaatggcatgatctcggctcactgcaacctctgcttctcaggtttaagtaattctcctgcctcagcctcctgagtagctgggattacaggcatgcaccaccacgcccagctaatttttgtattttttcgtagagatgcagttttgccatgttggccaggctggtctcgaactcctgacttcaggtggtccacctgtcttggcctcccaaagtgctgggattacaggcgtgagccaccgcacccagccaaatttttcttttttcttttttttctaattaaaattttttttttttggccaggaatggtggctcacacctgtaatctcagtgctttgggaggccaaggcaggaggatgacttgaggccgggtgttcaagaccagcctaggcaacatagcaagacacccatctctacaaaaaacaaaaacaaaaacaaaatagctaagcatggtggtgtgtgcctgtagttccagctactcggaaggctgaggtaggaggatcacttgagcccaggaggtcaaggctgcagtgagttacaatggcaccactgcattccagcctcgatgacagagtgaaactctatctcagaaaaagttttttaaaaaatatttttatttttaggactaagtttctgtctggtcggacaggacagatggggtacacataagaaggccctttcgtatttttagtagagacggggtttcaccgttttagccgggatggtctcgatctcctgacctcgtgatccgcccgcctcggcctcccaaagtgccttttttttttttttaagatggattttactctgtcacccaggctggagtgcaatggcaccatcatagcccactgcaacctcccaactcctgggctcaagggatcctcccacctcagcctcctgagtaccttgggactataggcatgtgccaccacatccagctaattaaaaaaacttttttgtttttttttgagatggagtctcactctgtcaccaggctggagtgcagtggcacgatctcggctcactgcaacctctgcctcctgggttcaagcaattctcctgcctcagcctcccaagtagctgggactacaggcacacgccaccagacctggctaattttttgtatttttagtagagacagagtttcaccatgttggccggcatggtctcgatctcctgaccttgtgatctgcccgcttcggcctcccaacgtgctagtattacaggtgtgccccgcacctggccttgttgttgtagagacaaatctcgctctgttgcccaggctggtctccaactcttagcttcaagtggtcctcacacctcaggcctcccaaaatcgtgagattacaggcgtgagcagccacgggctaatttttgtatttttaatagagaccgggtttcaccgtgttggccaggctggtttcaaactcttgacctcaggtgatccacccaccttggcctcccaaagtgctgggattacaggcgtgagccactgcacctggctgtaacttttttttttagccaaaattatgtgaacatatttgttaccagaggcaggtggtggtgggcggggtggggcggggactggggagatggtggccaaaggatacaacatttcagtgacaggaggaacaagttcaagagatctattgtacatcatggtgactatagttaataatcacatattgtatactcgaaaattactcagaaagtaggtttttgtttttttgagacggagtctcactctgtcaccgaggctggcgtgaagtggtgcgatcttggctcactgcaacttccccctcctgggttcaagtgattctcctgcctcaggcctcccaagtagctgggattacaggcaccagccactacgcccagctaatttttttgtatttttagtagagaaggggtttcaccatgttggccaggctggtcttgaactcctgaccttgtgactcgccctggcttaaggcaatacatatgttgtgaataagcttgatttggctaggcacggtggctcacacctgtaatcccagcactttgggaggttgaggtgggtggatcacctgtggttaggcgtttgagaccagcctggccaacatggagaaaccctgtctctactaaaaatacaaaaattagcagggtgtggtggtatgcgtctgtaatcccagctactcgggaggctgagacaggacaactgcctgaatccaagagggagaggttgcagtgagccaagatcacctcgctgcactccagcctgggtgacagagcgagattccatcttaaaaaaaaaaaaaagtgataataacaattagaaggaatgactaagatctactatttaatagtacagcagagtgactacagtcaataataatttaattgtacattaaaaaataactaggccaggcgccgtggctcacgcctgtaattccaacacttttggaggccgaggtgggtgggtcacttgagataaggagtttgagaccagcctggccaatatggtgaaaccccatctctatcaaaaacacgaaaattagcccagtgtggtggtgggcgcctgtaatcccagcttctcaggaagctggggagggagaatcgcttgaacctgggagacagaggttgcagtgagctgaaattgcaccactgcactccagcctgggcgacacagcgagaccctgtttcaaacacagacacacacacacacacacacaccaaaaacaaaacaacaacaagaaaaaataaaacaactaaaagagtgtattaaccgagcgtggctgtgcacacctgtattcccagctacctggggggctgaggcaggagaattgcttgaacctgcgaggcggaggttgcagtgagccaagattgcaccactgcactccagcctgggtgacagagtgagactctgtctcaaaaaataaaaataaaacataaaagaatataattggattgtttgtaacgcaaaggataaatgcttgaggggatggagactgcattctacatgatgtgataattacacgttgcatgcctgtgtcaaaacatctcatgtaccccataaatgtaatcacctgtatatacccacaaacatgaaaaacacaaaatacaaagacacatcacactgggagcaagcatttggagacaaaatactatgcactgtatgatctaatttatatgaaacttcacaagacaagtcaaattcatagtgatagcagattggtgatgacctaggtctctgtcagggctggtgctgagattgaagggcaggagggaattctagggctgatggaaatgttctatatcatcaatatcttgatggttgcccagctgtatacctttgttaaaactcactgaattggccaggcgcggtggctcatgcctgtaatcccagcactttgggaggctgaggcgtttggatcttgaggtcaggagttcgagaccagcctggctaacaaagtgaaacctgtctgtactaaaaatacaaaaattagccaggcctggtggcgggtgcctgtagtcccagctacttgggaggctgaggcaggagaatagcttgaacctgggaggcagaggttgcagtgagccgagattgcaccactgcactccagcctgggcaacagagggagtctccgtctcaaaaacaaaaacaaaaccaaaaaaaaaaacctcactgaattgtaaacttgaaatgagtacattaaacaattaaaaaaatttttaaattgaagtaaaataccataacaacaaattgaccattttaactattttaagcatacagctcagtagtgttaagtatattcacattgttgcacaaccaatctctggaattgtttcatcttataaaactgaaaaaaaaaaccaacaaaaactgaaactttaccgattaaacgacgactacccatcgccgcgtgccccagcccctggcaccccccgttcgactttttgtgtctatgagtgagttgactctggggacctcctatgagtggaataatgtggaatcataccatatttgtctttttgtgcctggctggcttatttcacttagcataactgcctgtgtcagaatttccttccttttttttttttttttttttttgagatggagtctcgctctgtcacccaggctggagtacagtggcacagtctctgctcactgcaacctccacctcccgggttcaagcaattcttctgcctcagcctcccaagtagctgggactacaggtgtgcaccaccacacccagctaatttttgtatttttagtagagacggggtttcaccatgttggccaggctggtctcaaactcctgacctcaaatgatccaccagctcagcctcccaaaatgctgggattacaggcgtgagccaccacgtctggcccacaatttccttcctttttagggctgaattatattctatcgtatggatggagcacattccacttatccattgatctgtttatggacacctaggttgcttcaatcttttttttttttaacggagtcttcctctatcacccaggctggagtgcagtgtcgtgatcttggctcactgcaacctccacctcctgggttcaggtgattctcctgcctcagcctcctgagtagctgggattacaggcacgcaccaccacgcccggctaattttgtatttttagtagagacgggatttccccatgttgtccaggccagtctcgaactcctgacctcaagtgatccgcctgcctcggcctcccaaagtgctgggattacaggcgagagccaccacatctgacctgcttcaatcttttgactattgtaaataatactgctatgaacatgagtgtacaaatatttctttgagaccctgctttcagttcttttggccacacacccagaaatggaattcctgggccatatggcaattctatttataatttatttgaggaactgccagaagctttttccacagtggctgtaccattttacattcccaccaatagtgcacaattttgtcacattctcaccagtactttcatgttctgtaatttttttgatggcagccatcctaatgattataataaatgggtgcatcttattgtatataaattacatcatggctgggcatggtggctcacacctgtaatcccaacactttggacaacaaggcaggtagatcacctgaggtcaggagttgagactagccttgctgacatggtgaaaccccatctctactaaaaatgcaaaaattagctgggcgtggcagtgagcccctgtaatcccagctagtcgggagactgaggtggaagaattgcttgaacccgggaggcagaggttgcagtgagccaaggtcgcaccactgcactccagcctaggtgacagagtgagacctcatctcaaaaaaaaaaaaaaagaaagaaaaagaaaagaaaagaatatttatacctgggtcaagtgaaaattagacaaagagagacatatggccaccctagataaggtaagttacctgtgtgtatttttaggcaaggagagagttacagttatatcttaggtggtaacatcttacgggtgttaaaggtttattgcaggtgtttccagtggtttttcttgagttgagttacttccatcaaggtgtacaggtacttacagacctattagggcatgctatgaaatagtcacaagtggttactgttgtgatatgggtgagctccagctaagcttttgtattagtcagctactgctgcagttaacaaattatctcaaatttagtgacttcagacaatgcaaacttattatctcactgttctgaagatcagaagtctgacactgatcccattggacttatattaagatgatggcagggttgcatccttctgggggagaattcatttccttgccttacataacttctagaaatggctgctatggtttgaaagtttgtgtcttttcagaattcatgtgttgaaacctaacctccaagatgacggtattagaaggtggaggctttagggggtgactaggtcatgagggtggggccctcatgcatggaattagtgccctcatcaatcatcagagacttacttgccctttctaccatgtgaagacatggcaagaacatggccatctgtgaaccaggaaaagagccctcacaagacagagtctgccaacatgttggttttggacttcccagcctccagaattgtgagccaaaaatgtgtggttgtttagaagcaactcagtttatggtgttttgttatagcagcctgaacagactgaaacagccactgatgtccttggctcttggtccttttctcctttttttttttttttttttttgagatggagttttgctcttgttgcccaggctggattgcaatggcgtgatctcggctcaccacaacctccacctcctgggttcaagcaattctcctgcctcagcctcccaagtagctgggattacaggcatgtgccagcatgcctggttaattttgtacttttagtagagacggggtttttccatgtttgtcaggctggtctcaaactcctgacctcaggtgatctacccgccttggcctcccaaagtgctgggattacaggtgtgagccaccgtgcctgtccccccctttttttttttttttttttgagacaggatctcagtgggttgcccaggctagaatgcagtggtgcaatcatagctcactgcagcctccagctcctaggctcaagtgatcctcccacctcagcctcctgagtagctgggaccacagtcatgtgccacgatgtccagctaagttttcaaattgtttttgtgaagattaggtctccctatattgcccaggctagtcttgaactcatgggtcctagagatcctcccaccttggcgtccccaagttctaggattgcagtggcataatcttggctcactgcaacttctgcctcccagattcaagccattctcctgcctcagcctcccaagtagatgggattacaagcatgcaccaccacgcccagctaactttttgtatttttagtagagacagggttttgccatgttggccagtctgatctcaaactcctgacctcaggtgatctgcccacttcagcctcccaaagtgcgaggattacaggcatgagccactgcacctggcccccttcctccatctttaaagccagcaatggtgagtggagccctcacatcacagcactctgccccttctgaaggccttctgcctctctgattttctcctgcctctctcattcacttttaaggacacctgtcattacttcaggcccacctagataacctaaaataaactctcccattttaggagtctttttttttttttaaattttttgagagggagtctggttctgttgcccaggctggagtgcagtggcgctatctcggctcactgcaaccttcacctcccgggttcaagcgattctcctgcctcagcctcccgagtagctgggattacaggcatgtgccaccatgcctggctaatttctgtatttttagtagagacggggtttcaccatgttggccaggctggtctcgaactcctgacctcaagtgatctgcctgccttggcctcccaaagtgctgggattacaggcatgagccacggcgcccagccaggactcttactttaatcacatgtgcaaaatcccttcgtgatacctacctaaggtatgacatattcacagatttggggattggcacagggacatctttggggaaggcatttttttgcctactacagaccttgcacggtgttctatgcaattggtgttgcgccccagggttgttacaggtgtatttcaggtcttacaggggcttctcagagcccctgggaactccaggaaagtggatctgtcttgagaatgctgacggggctcagcctgggtctggcgtcggtcccatcaggctctggggaaatgtcacacggtttgtcaggcacaggccacttcctgcacccccatcagccctttttttttttttttgaaatggggttgtgctctgttacccaggttggagtgcagtggcgtgacctcagctcactgcaacctccacctcccaggttcaagtgatcctcccacctcagccttctgagtagctgagaccacaggcacatgctaccacacccggctaattttttgtatttttgatagggacgggatttcaccatgttgtccaggctggttgaaaactcctgactcaggcaatcaatccacctgtctcagcctcccaaggtgctaggattacaggcgtgagccaccgcacctagcctgttttttgttttattttattttgttttgtttgtttgtttgcttgttttttgaagtagagacaggatcctgttatgtcacccagggtggactgctgcagtgacgtgatcatagctcattgtaaccttgaactcctgggctcaagcctcttgcctcagcctcctgagtagataggactacaggcatgtaccaccatgcccagctcatttaatttaaaattttctttttatagagatgggggtctcactatgttacccaggctgggcttaaactcctagtctcaaatgatcctcgcacttcagcttcccaaagtgctgggattacaggcgtgagccatcacactcagccacctgtcagcctttagaatagtctttctggcaccaccaatattccaggaaaacaaaagccaactgaaggttaaggtctgttccagaaatagggataggctccagggattcctttcttcccagagaagttgaatcttggagtggagggtgtggcctggggcctgggacctgactctctcatttggggtcattatgggccttctggaacactggtgggttacagccaggcgactgggaggtagggcttgtgagctgatcataaatgcagatggcaggtggcgaggagaggacggacatatccaggccagccacttggctctctgggctcctgacctggagctcccttgggccctgctgcccccagaatctgagcctgggggtaccaggggctccagggcatgctctggccatggataggatcccagggcagttccaatttaactctgctgtctggggtctctgccagactggtgtgcggtggtacaatcatagctcactgtagcctggaattcctgggctcaagcaatccttctgcttcagccttccaagtacaggagaatacaggtgtgcaccaccatgcccagccttttatttttattttattttattttattttatgttatgttgagacagagtccctctctgttttccaggctggagtgtagtgacacaatctcggctcactgcaacctctgcctcctgggtgtaagcgattctcctgccttagcctcccgagtagctgagattacaggcacccaccatcatgcccggctaagttttgtatttttagtagagacagggtttcaccatgttggccaggctggtcttgaactcctgacctctggtgatctgcccacttcggcctccctaagtgctgggattacaggcgtgagccactgcgcccagcctattttttaagtagagatgaggtcttggtatgttgccccaggctgatctcaaactcctggactcaagtgaccttcccacctccacctcccaaagtgctgggagtgtttacggaaataccaggggtttggtctaggtcctgctgttcaccgcacagatagccaatcaccgaggcaaggattattgccaagcaagaaggctttaggctttaattggatgctgcaaccaaggagatgggagctcagtctcaaatccatctctctggctgattaaaattaggggtttatatagcaggggagaaatagaacaatatgtggtaaaacaggaacgcgggaggggtcaggaagcaattgtgatgaatgagcagcctggtgtctcatcgtctgcatgtaatgatctgctgagtttcaactctgatgatttttgagagcctggggatcctttcctgagaaggaactcagataaaacaaatttttttggtttgtttatttgagacagagtttcactcttgttgcccaggatggagcacagtggcgcgatcttggctcactgcaacctcctcctccctggttcaagcgattctcctgcctcagcctcctgagtacctgggattacaggcgcccgccaccatgcctggctaatttttcgtatttttagtagagacagggttttgccaagttggccagagtggtctcgaactcctgagctcaagtgattcatccgcctcagcctcctaaagtgctgggattgcaggcgtgagccaccgcgcctggccagataaaactaatgctaaatttcaagctttaagaccacagggtcaggccgggcacggtggctcacacctgtaatcccagcactttgggaggtcgaggtgggtggatcactggaggtcaggagtttgagaccaccttggccaacatggtgaaaccctgtctctactaaaaatacaaaaattagctgggcgtggtggcgcatgcctatagtcccagctactcgggaggctgaggcaggagaatggcgtgaacccaggaggtggagcttgcagtgagccgagattgcgccactgcattccagcctgggcaacagagcgagactccgtctcaaaaaaaaaaaaaagaccacagggtcaatttctatgtttattgaaaagaactgtctatggcaacaatccctaacctttttggcaccagggaccggttttggagaagacaatttttctttttcttttttttttagagacagagtcttgctctgttgcccaggctggagtgcagtgtcgtgatctcggctcaatgcaactgccgcctcccagattcaagccattctcccacctgagcctcccgaatagctgggattacaggtgcacaccaccatgcccagctaattcttgtatttttagtagagacggcgtttcaccatgttggctgggctggtctcaaactcctgacctccggtgatctgcccacctcagcctcccaaagtgctgagattacaggcatgagccactgcacccagcagacaacttttccacagactggggtgggggatggtttcaggatgattcaactgcgtgacatttattgtgcactttatttctataattattacattttaatatgtaatgaaataattatgccactctgcataatgcagaatcagtgggaactctgagcttgttttcccgcaactaagacagtcccatctgggggtgatgggagacagtgagagatcatcagtcattcgattatcctatgacccagatccctcgatgtgcagttcacaataggcttcatgctcctgtgagagtctaataccactgctaatctgacaggaggcagaggtcaggtggtcatgcaagcaaaggagagtggctgtaaacacagatgagctttgcttgctcacctgctgctaacctcctgctgtgtggcctggctcctaacagggcacagatcagtaccggtctgcggcctgggggatgaggacccctgttctatgagactgttgggtgggtttcaggatgacaggtgcacaccactgcactcagcctctcttccttctgcctcagccacagctggcactttctcagctccatcctcaggggagatgctgaaacctcttgtgcctgcccgtgctgttgctgtacatttgtcacgacagcctggcaggggctccccattgaggctgtcggtcagacttgaagtccatctgttgttcttttaaaaaaaaatttttttttagatggagtttcactctgttacccagactggagtgcagtggcgtgatctcagctcactgcaacctccaccttccgggatcaagtgattctcctgcctcagcctcctgagtagctgggattacaggcacccacaaccatgcctggctaatttttttgtatttttaatagagatggggttttgccatgttagccaggctagtctcaaactcctgacctcaggtgatccacccaccacagcctcccaaagtgccgggattacaggtgtgagccaccacacccagccatgaagtccgtctgtcgttctgtctctgttgttcttcattcgatccggagtcgccacctcattgtcagtatgtttgattacaatctgtctgtatcatccagacaatcacttaatctggctcatcaagtagttagacctctaggtaagtatctcactgctgtcccacctgggagtctatctcagatggctctgccctgtgctgtgatgctatgatggttaacacctggtgtcaacttgaccggatggagggagatgcctggatggctggtgaagcattgtttctgggtgtgtctgtgaggatgttatcagaggaggttgatatttgagtccgtgggctgggagaggaagacccatcctcaatgtgagtgggcaccatcccatcggccgccagcgtggctagaacaaagcaggtggaagaaggcgggagaagctggcttgctcgctgagtcagctccctctctcttcccctgctgtgccaatcacttggtttcctctcctcctacccttggacatcaggctctaggttctttggcctttgaactctggcacttgcaccagtggcctcccaggtgttctcgggcctttggctgcagactgaaggttgcactgtctccttccatgatttttgaggcttttggacttggactgagccacactaccactttctgtctttcccgggcttgcagacagcctactatgggacttcgccttataattgtgtgagctaattctcccaaataaactccctttaatattgtgttaggctgttctttttttttttttttcctcaagatggtgtctcattctgtcacccaagctggagtgcaatggtgtgatctcagctcagtgcaacctccacctcccaggttcaagtgattctcctgcctcagcctcccaagtagctgggattacaggcacccgccaccacacctggctaatttttgtatttttagtagaaatggggtttcaacatattggccaggctggtctcgaactcctgacctcaagtgatctgcccgccacggcctcccaaagtgctgggattacaggcgtgagccaccacacccagctgtgttaggccattcttgcattgctataaagagatacctgagactgggtaatttagaagaaaagaggtttaattggctcatgattctacaggctgtccaggaagcatagcagagatatctgcttctggaggggcctcaggaagcttccaatcatggcagaagacaaaggcgaagcaggtgtctcacatggcgaaagcaggagcaagagacagcgtggcaggggaggtatcacacacttttgaacaaccagattttatgtgaactttgagtgagagctcacttatcaccatggggatggtccaagccattcacgaagaatctgcccctatgatgcaaaacacttcccaccagcccccacctccagcactggggatacatttcaacatgagatttgggtggggacaaatatcctaactatatctcacacacacacacacacacacacacacacacgcatatcctatcagttcagtcctggacaaccctggctaacacagatttgtgatgacctgcaatataccatgtcctcatccctggatcctgtgaacatcactttatatggcaaaagacactttgcagacgtgatgatggatttcaagatgggaggagctcgtgtggtaaagaatttgtccctggttcctgctaggaagtgtctaagtccttggaattttccaagtgctgtgagtctttgttattcatcagggccctggaccacacttgggtttatatgagggggtggcttaggatgggtgctggtcatgccagatacatcaaccatgagggttggaatttgcagccacttgaccaaaagggggactggagataaagttcaatcacaaggccaacgattcagtcaatctttcctgtgtaatgagaccccactaaaaactcccgaggccttgtgaggtggctcatgcctgtaatcccagcactttgggaggccaaggcaggaggatcacttgagctcaggagctcaagaccaacctgaacaatatggtgaaaccccgtctctacaaaaaatacaaacattagctggacagggtggtgacatgtgcctgtagttccagctactcgagaggctgagaggtgggaggatcacttgagcccagaaggttgaggctgcagtgagctatgattatgccactgcactccagcctgggcaacagggcaagaccgggtctcaaaaaaaaaaaacaaacaaaactgaaacactgaaggagtaattggatcaatcctgcctacatactgaaaccccaaaaaaactcaggacaccgagctctggagcttcctggctggtgaacccatcaccctgagagtggggaaggcatagagagagtgatgtgtgctgacgttatggggaaggacacaggagctccgtgtttgggaccttcccagacctcaccctatgtatcttctcatttggcaggtcctgatttgtattttgttaagaaaactgaaatcagggccaggcacagtggctcatgcctgtaatcccagcactttgggaggccaaggcgggtggatcaccagatcaaaagagtgagactatcctggctaacatggtgaaaccccatctctactaaaaatataaaaattagccaggcatggtggtggcgggcgcctgtagtcccagctacttgggaggctgaggcaggagaattgcttgaacccgggaggcagaggttgcagtgagctgaggtcgcaccgctgcactccagcctgggcgaaagagcgagacactgtctcaaaaaacaaacaaaaaaacaaaacaaaacaaagaacaaaacaaaacaaaaaacaaactgaaatcgtaagcatagcatttcctaagttctgggagtcattctagtgaattatggaacctgaaggggtcatgagaatttgtaggcagttgatcagaaatgtgggtggctggggatccccaaacttgtagctggtatctgaaatgagagcagtcttgatggggactgtgtccttaacctctgggtggagtctgcactatctgggtgaatagtggcagaactgcatttagaattacaggaggccaggagcagtggctcatgcctgtaatcccagtgctttgggaggccaaggtaggcgaatcacttgagctcaggagtttgagaccagcctgggcagcataatgagaccgcttctctacaaaaaaataaaaaaaattagccaggcatggtggcacacgcctgtagtcccagctactcaggaggttgaggcaggaggattgtttgagcctggaggattgcttgaacttgaacctgggaagtcaaggctgccgtgagccatgttcatgctaccgcactccagcccaggtgacaaagcgagatcctgcctcaaaaagaaaattaaaaaaaaaaaaaaaaaaaggaaccacaggagatcatcctgtactatcaggtcaggccctaaatgcaatcccaactgttcatataagaaggaggcaagaccagcctgggcagcatagtgacaccccatctctacaaaaaaactaacaaatagctgggtgtggtggtgcatgcctgtagtcccagctacttgggaggctgaggcaggaggatttcttgagcccaggaggttgaggctgcagtgaactatgatcgtgctattacactccagcctgggtgacagagcaagaccctgtctcaaaaaaaggtgattgtgggggcattcctagagagatttgatacagaagaagtaattgtcatggctgaagctagatgctaccctactgcctttgaagatggaagaagggtccaggagtcaagaaggatgaggacaacagctctagaaaagctaaagaagaggtaaagaaacattttccctttgatatggtttggctgtgtccgcctccccaaatctcaccttgaattgtaataatccctgtggatcaagggtggggccaggtggagataattgaatcacgggggcagttttccccatactgttcttgtggtggtgtatgagtctctcaagatctgatggttttattttttaattttttaatttttttttttgagatgaactcttgctctgtcacccaggctagagtgcaatggcatgaccttcggctcactgcaacctctgcctcctgggctcaagcagttctcctgcctcagcctcccgagtagctgggattacaggcgcctgccaccacgaccagctaatttttgtatttttagtagagatggggtttcaccatattggccaggctggtctcttggccaggctggtcccgaactcctgacctcgtgatccatccgccttggcctcccaaagtgctgggattacaagcgtgagccaccatgcccagcctcaagatctgatggttttataaatgagagttcccctgcgcaagttatcttgcctgccaccatgtaagacatgcctttgctcttcctttcctttctgccatgattgtgaggcctccccagccatgtggaactgcgagtccattaaacctcttccctttataacttacccagtatcaggtatgtctttattagcagcatgagaacggattaatacatccttagaccttggtttttgcccagcaaaatccattacagtagtggtgggaaactcaaacactcctccaagccaactgtgtctggaagtccagcagcctggccctcagtccagtaggcaagtcaataggctcctggacttgcccagtgcctgctccagactgcaagtttagaaagatcagaggataggggggttgacaggttacagcagtggaagagttccacctggccagggaatgtgatggtgttccttctatttcctgctcagctgatgctgttatacggtccagcagcctgggggctcccagcagcctgtagttctagactccgttctgcacagaactaaaagctgccaacctgtcactcccctgttgaacctgtctccatgggaaattcttggagagcccctaactctccgagatggaagcaagaaactgggagtgtagggtgaattcagatcaaaagtccctggttgagaaacccaggttctatgtaacatatactgctgtgtgaattcagcaatctgtataccttccaacctcctagtattccttttttttgagatatggtgtcactgcattgcccagaatggagaacagtgactatatcaacaggcaagatcatagctcactgccgtctcaaactcctaggcttaagcaattctcccacctcagcctcccgagtaactgggactacgagcttgcaccaccacacccactctccaagcctttttcttcctggaccttctgcttccaaagtcctaccttcccagcttcatctactcaaaattccattgtcccttggaaaatccaccttctctggaatgtatttcctgactgacccatccaatagtcacagaccctagatgcactgagcagaagggacctgctcgttccatcagggtaccctgtcccccacctgcctcaagggcctgtctcaggatgcccataatctccacgaagacgtgacagtcttctcaaggactgcagtatctcaggatggtccctctccccaaagacaaaggtgacccttccaaatgcttcaggtgtcctctccacacactcatccattacattactggtcattttgttcctgtaccccgctagaccagaatgcagcggtcccaggggaaaggactgcgtctgacccatttctgtgtccccagcaccctctgagccaagccccatgccagggactgaggaagtaatggtgtagagtgggaaactgcccctaccttcaagccctcctggcccagggcaagttacccaccaaaggccaagaggtcactgagagagtccaggggtcactcgtacggattaaactaggacatccggaataaagcacagaagatctcgccagagccaggatcctggattcatttctcaaatatttattgatgcttcctcaggctgcaaaaacagcttccagtttggtggaaaatgcgagaaaaccaaacagctccagtcctcagtcacctaaccttggttagggagagaagtggaggcatatcacggggacgcaggagcagggattttggagctagtggaggttaggttgggtctgcgtgagtggagttaggatgaggtcggcatggaggtcccagagcccaggcactgggctggacagggctatgttgggccaagtgtttctgagactcagcagcggtggatgaggaagaaaaaactctttggcaatcagctccaggagccagggaggtgagcagcccccaggatacgacatgctgcaatgggcgcggctccagggcactgggcggggtcagcagttgtgccttttctcacagatccagccgtccttctcgctgtcacacggtgcgtcgttccacagccccgtgtgcagcatcatgacacagttctcgcgcccccaagcgtcattgggctctccctggttccagtggctacaggggggttgagtgggggtgttgctgggaatctagacagaggatgaactcggggtcccgccttcctcttcaggctctagcctgtttattgcttgggtctactctagacaccccaactgtctaacctgagtatacacctggtatataactttttaacgcccagaatttaacctgaggacagttcctggggtccagcctgcccatccctaagtatggagccccagccgaggggtccctgagatctagccaaagcatgtcctctagagcctaacctgtctccctccccaggtctcaccaggagcctttccctcacctgaagctgagagagactccgtccacccactggtagccctgaaccttgcccagatggcgcacagccctcaggcccagccagtaaccacggccacgcgtgttccgagtgaggaagccctagaaaggaggggacatctgagcctgcagagtccgccccgccctgccccaccgcctgaccacgccccctccccctgcgcacctgctcatccaggcccccaacgatcaccaggtgcgcgctggcatctgcgcagtgatcctgcgccgccgcccacgtcgtctttggcacagagaaaaagtagcaggagccctcgaaggacagccacgacgtggggcacggctcgcaggagtctgcggggtggcgagggtcagagaggtcgcgtgcttccaggggcaacgcaccgagaggatgcagtgggtaggggttcggccccgcgggctcaggggtggagacacagaaccaggccaaggtccaggagtgacagggtccgcttacgccctcacagcccgcccccgaccccccgtctcgctcactgttctggagcctcacggcctccagcgcccggaacagctcagtgcggacgtcctcacggcccctgccggcttcagccaagccctgggtcactgcggggtcaagggagcggggattatggctggggtcagggccaggaccagggtcatgactagctaaaggtcaggacccctgtctgtggtcattgtaccctcggtgccagcgtccaggatggcacagggtcaagggcggttacaactgggcagggtccgggtgtggccggcgctaggagtggcagtcaaggtcagagtgcagcgtcagggtcaggacggggtgcatgatcggggtcgggggtcagcactcaggacggggtcggggtcgggggacgcggccagggctcagggccggggtcgcgtcgggccctcaccgcgctcacgcagttcccgcagggcgctctcctgctccatcagcttcgcctgcgcctccccaagctccgcgcgcgtggtctgcagctgcgcctgcgtccccgagcctgggagccgcagggtgagaggggcgagggcggcgaggatggggcgggacttcggagaccagcccccgccccgcaccacccgccgcaggcctccgccccggcccccctcccatcgcggccgcaagaccccatccctgcgcccacagcctcgaccgcgccccctcacagcagctgtggcagtctccgacctcctccttcagggcacccagcgccgccgtctgcttcgaggctggaacgacccccgccccaaaatgcatgcccctcgggtcacttgggaggactcaggggacccccttccagcctcagggaccatagggcccccacgcactcgagactccatctccggggtctcagaaactcccgcccctcacgccccgggggcccaggcgcccggctctgcacacaccgtttgtcctcagcaggtcgtggccgtcaagcagcgccgcgcgctccgtggaggctgaggagagaggctcctgcaggcgaggccgggaactcgggaatcctcccctcgcccggggggtgcagcgtcccccaactcgggagcacggagcgggcgggcaggcatacagctcacacgatgtgcacacacgccgatgggagacaaacgcgcggggactcgcgcacatacgagcacgccatgtgcacacgcgtgagtgcacacggcccaaagatgtacacacactctgctcacactcagacgcgaacaggaccccaggatgcagctggtgcgccatgcagtgggggttttctgtccccaggggggccggatgcaacacctccccattgagagtcactcacccttggacaataggatactcagaatcacagcccaaaggactgtggtgaccaggacagccagggccaagaagaggggtctcctgctccagtgcacccagcgtccccagggccctggcataacaaggacggcatgctgggtcccccagaactgagccctggaggcctgagttactcccaggaaactgagattcagagaagttaagtaacttgcctatggtcacacagcttctaagcggcagagttggaattggaccctggtccaactggctctatggcctgtggtgtctctcctgcacccacaaccctggcctgtctcgactcttccctcccctcccccatcaaaccccagacactggggcagggatggggcagtctccttgctcatacctccggggacctcctcggagctgccgccccacttgctgtacctggtggtgtccatggcgatgcaggcacccagtcctgggcagagatataaatttcacgcctgttctcactggacctacgcactcccttccttccttcccattttcttggccttaattcctggcaacgggaacccatggaccaatcacaggattgggccctttcaaggctgggctgggctgggctggagtgaggccgggcggttccagcctcctggttctggccactgcagctccatccccaggctggtgctggaggcttctctttggagcttagtcaccatctcttatgggcctggggctggaggcttctctttggagcttagtcaccatctcttatgggcctggggctgggttttatcccgcgagggacacactgaacccgaccaaattgtaacccctgctggctcctgagaaagccccctcaggcatagccccccaggccagttcaggtcccttctcaactcccctgcaggtgcctgcagaggctgggtttgaacctgaccttgatccagtccctctgtaccagaagggaacaaacagttttgttagggaggtagccggcggagctgcaggactctaccactgtatgggttctaggtagcttctagaagccttagttttccccactgtaaaggagatagcgatgggcctctctcacaaagatgctatgataaagaaacaagacagtcttgctggctcacacctgtaatcccagcactttgggaggccgacatggaaggatcactgagcccaggagttccagaccagaccagcctgggcaatataacaagaccctcatttctgaaaaaaaaaaaaaaatatatatatatatatatatatgaaaacaaaaattgaaaaaataaaaaaataaagacaatgaggttatacatgtctacctagcaccatttcaggcatatcaaaaacactcagtgttcatgcattctttcaacaaacattgagcacctgccatatgccaggcattgatcttggaactggggccacatcagagagtaaaataagcaaattcctctcttcttggagctaatattctagaagtgtggggagacagactccatactcaacgtaataaacataattgaaaacataagttgtatagcatagtagttcccagctgggggcaattacgcccaccaggggacatttggctatgtctggagacacttttggttgtcacagaatgtgtgtgtgtgtgtgtgtgtgtgtgtgtgtgtgctccaggcatctagtgggtagaggccagggatgctgcgcaaagccctacaatgcctaagacatcccccatagcaaagaatgatctgactcctaatgtccatagtgcaaaaggtgggaaccgtagtatactctattcaaaagtcataaatgctatgaaaaaacattaagggaagaaaaaatccagtaggataagtacttggcaggactgggatgggcactaggcagtgggcagtggctagggtggccagggccagcctcactgacaaggtgaaatgttgagcacttaatagaatgttccagcccctcttgtagatatgtaaacacacttcatcttcttgagcctctcaaaaacccttatccattttttcatttaaaaattttatttgagccgaggcgcggtggctcagctctgcaatttcaacaccttggggagccaaggcagggggatcgcgagaccagcctgggcaatgtagcaagaccccatctttacaaaattaaaaaaaaattttaaattacctgggcatggtgatgtgtatcggtagtcccagctactcaggaggctgaggctggaggattgcttcagcccaggagtttgaggctgcagtgagctgtaattgtgcccgctgcactccagcctgtgacagagtgagaccctgtctcaacaataaataaataaataaattgtacttattgtctatttccccctttcttcttccaggaatgagagacattcacaataaaatgaaataaaaaaaacaagaggattttgtaaaagaaagatggaagggaaaggaaggtgaagaaaaaaccacacatctaaaaagacaagccttgtacacaaaactcagaccagggtgtcaggcttcataccagcatctcctggttttgttgaggcagggaatagggtcagacacccagcaatgggcaactgactcttccggagtaatattttggggtggggtgggagagggggatgtgtagaattaagtcctcatgaaagtttccataaatgcagtagcaattggctgtcactgagcagagagtagatggcttcctggttcagggagtggaaatgaaaccccacaagaattgcacaatctctgtccaaagcaaccatcgtaatgtgttctggggaaaggatttacatggaagtgtttcatcagcccttatggaggagatagaattagttcatttgggaaatcggaggttttctggaagagatagcatgagacgtgtggctttgacgacatgtgtattgtggacagagaaaggaaggacacaccaggcacagggcacagccaagacaaaggcaagggggcaggaaagtggggctcagctggatacacctgtggctgaagctgccttggcgagccagggcggagctgtccagtttagcgaggaagccagaaggctgcccatccatgtcccgtgcccagacctcgctgtgggataactgagaggggaagagaggtcctagaaggaggcagcagacctccactctctacccctggcctaggacagggaagggaggcctgtttctcggggaggggggcagggaacatgtaaccaggcaatttgaaggcaatatgatgagtctgggaagtataggagactgtgaggaccactggagacactggctgagccgggagggcttcctggaggaggtgatgcctggggaaggagtcagaattattccagaggagatggatacattaaagaatggccccaacatggttatcagcacatgcaaagattgggagagtaagggaacaggacttgttggagaagctgagagtaattcaggggcagtcatctggggctagggtgtcagctggggtcacatcatacaaggacctgaagagcagggacaagaggtttgggcgaatgtgggaagaaggtgaaaatcacaggattcagccccaaggccatgaccactctggtttccattctctgcagagatgagagggttgctgtaaccagggaagccagcccactgcaaagggcatatggtgtactggttgtcgctctgaattttggctttgcttttattttttattataaagtatgcaaagaggtatgcaggaaaaaaaatgaaaacgcttatgccttccactcagctttatcaagttttgatatcttcacatatttcagatattcttaaaaatcatcacgtaacaaataacaaaatgtagcaaataacatcgtataacaaacatgataacataacaaataacatcacataacaaataacataacatcgtcacataacaaatcatagcaaatagagtggaggtctcttgtaccccaccctcctcttattcccctccccaaggccactgctctcccaaacttggtgtttatcctatcttaaaatgctttaattacaaatctttcaatggtgaatatattgggctgttttgcacatctgggagctttattaaaatgtcatcacatggtctatatccttccggaacttgtttttgtcctctccacattacaattatgagatatgtctattcaacattcattctgcatttaaaatgaagataagcacaaaaaataaatgcttagtaaacacagaacaggataaagcttccttaatttgagaagtggcaatttccaggatcttacagaaatgtcttccttaatagtgaaacatgagaaccatttttggtaagatccagaagaaattcaaaatgtccacggtgtaggggattgaacagtgtcccccaaaagcaatgctggggctaactgtggtggcttacacctgtaatcccagcactaggctgaagaagtgcttgaggccaggagttggagaccaacctggacaacacaagaagaccccacctctacagaaaaatttagctgtgtgtggtggcacatgtttgtagtcccagctactcaggaggctgaggcagggcaatctcatgtcactacactccagcctgggcaacagagcaagatccccttttttttttttttgagacagggtctcactcggtttgcccagtggcagaatcacagctcactgcagccttgacctccagagcacaagtgatcctcttgcctgagccttccaggtagctgcaactgcaggggagcaccaccatgcccaactctttctttccttccttccttccttccttccttccttccttcctttttctttctttctttcctccttcctttttctttctttctttctttcttttctttctttttcttccttccttcctttctttttctttatttctctctttctttctttcccttctttctctcttctttctctcttctttccttctttctttctttctctctctctcttctttctttttattcttccttccttccttcctttcttctctctctctctctttcttttttttttttgacagagttttgttcttgttgcccaggctggagtgcaatggtgcaatcttggctcactgcaacctccgcctcctgagttcaagcaattctcctgcctcggcctcccaagtagctggggttacaggcgcatgccaccactcctggctgattttttgaatttagtacagatggggtttcaccatgttggccaggctggtcttgaactcctcatctcaggtgatccccccgcctcgacctcccaaagtgctgggattacagatgtgagccacagcacccagccagtttttctatttttttttttttttttttttttttgtaaagatttgatctcactttgctgcctaggctggtctcgaactcctggcctcaaatagatcctcctacctctgcctcccaatgtgctggaattataggtgtgagctgcctcacccagcccctatctcttaaaagcaaaacaaagcaaaatgagagaagagagacacagagggaagatgacgtgaagaggtaggaagggagaaaatcatgataacagaagcagagattccagcaatgggtgtacaagccaaggaacgccaaaggttgtcggcaaccaccagaatctagagaaacgcagggaaggtttctcccctacgcaattcagagtgaacacagccctgctgacaccttgagttcagacttccggccttcaggactgtgagagaataaatttctgttgttcaaagtccccgctttgtgctactttgtcgtggcagccctagctcactgattctggctggataaggggtaatttctgtgagcctgccgaaacgccttactcaatagtgaaatgtgagaagcatatttagtaaaatcaagaacacgataaagatgcccctcttgctattttgtcgatgcaataaggaaatataaagaattaagacctgtaaatattggaaaggatgagtcaaagctgacaatatttggaagatgcgatcttgtatctaggaagctctagggacttctggactaattaaagaacttggttgggcgcagtggctcacgcctgtaatcccagcactttgggaggctgaggtgggtggatcaagaggtcaggagatcaagaccatcctgactaacatggtgaaaccctgtctctgctaaaaatacaaaaaaaaaaaaaaagtagccgggcgtggtggtgggtgcctgtagtcccagctactcgggaggctgaggcaggagaatggcgtgaacctgggaggcggagcttgcagtgagcggagatcgccccactgcactccagcctgggcgacagagtcagacttcatctcaaaaaaaaaaagggaggacattctgacacatgctacaacatgatgaaccttgaggaaaatatgctaagtgaaataagccagtcataataagacaaaggctgtatgattccattcatgcggggtccctagagtcatcagattcatagaaacagaaagtagaatggtgggtgccaggggctggggaacggggaatggggagtcagtgtttcctggggacagagtttcacttgggaagatgaaaaagtttgcgagatgaatggtggtgatggttacacaacaatgtgaatctactttgtaaaagaaaagaaaatttcataggctgggcacggtgactcacacctgtaatcctagcactttgggaggcgaaggcgggtggatcacctgaagtcaggagttcgagaccagcctagcgaatgtggtgaaaccttgtctctacgaaaaatacaaaaaaattgccgagcatggtggcgggtgcctgtgatcccagctactcaggaggctgaggcaggagaactgcttgaacccaggaggcagaggctgcagggagctgagattgcaccactgcgctccagcctgggtgacagagtgagactctgtctcaaaaaataaaaataaaaataaaaatcctttgggctccacctactccacagatagattttcaaaattctgttgaaggatttccaaacagattttaaaacaaacttgacaagctcattatttggaatataataaagaggttatactctttagttgggaataaatagcaaagctacaagtggggacagtaacctcttgagatgggaaaacggggacggaatgagctttagttttcactgtagagattgatacgttttggttctgtgtgcacacgtgacttattccacaagtaaatgaaaacctttaaagccagagtagactcaaaaatcatccaaaaattgcacaagaatacctgagaacattttgatagagaagagccatgaccaggcaggccacagcggcccaggcctgtaaactcagcactttgggaggctgaggcaggaggatgagttgagcccgggagttcaagaacagcatgggcaacacagtgagaccccatctctacaaaaaattttttaaaagtagctagatatggtgatgcacacgtgtggtcccagctactcaggaggctgaggtgggaggatcactggagcccatgaggtcaaggctgcagtgagccatgattgcaccactgcacttcagcctgggtgacagagcaagaccttgtctcccacataaaaggagccatgcctggtagttatcaaaatataagcttggcttgggtttcccctactaaagagcttgagacaaggatttggatataagtagcttatctgggaggagattccaagaagcatcagcaggggatgggaagaatgaagaggagcaggtagggaaaggaaggaacccaatacaaaggcaccaatgagctgaaaagggcaattgggtccaatccccctgggagcctctgggagacgacatagaacaagcctcacagttcctctgcctgttgaaggtcaactcttaagtaagacggaatttagcttgcaagctgtttatgaaggtgcatctttggggtcaacatcagtagaaaggaagtgatgtttgtggtgtcttatttacaccaaagaaattctctaattctaacactagcttcctggagttagcaccacattccacaaattaaagggctaggtcccaaaagactgaccctgcttcagatgccaggtgcaaagacagtctttgcactgtctacccacacttctgccaggctggcaaaaaattgtggcttcccataagtccatctcaagttcagtaatttcctagaatgatttagagaactcgggaaaacattttgcttatgttgttgccgaactaaattgggtcagttccctggctcacagtggaaaaccaaacactgaagcactggggttttgtagagagaaaaatttattgcaaggcagccaagcaaggacacaggagtctggcccaaatctgtctctccaagttggaggctggggcagattttatatacagagggtagtgaggcatgatatgattggatcttgtaatgaggggattcaggaggcttgatctgactggatcacgccagggctcaatctgattggatcaaggatcatgccacgtggtgtccacttcttaactcagtccctgttcctcggtctgagcacttaggttccacgtggatttgcacgcttcgttcatctggacatgcccagggtatgtaacttgcaacctgggggtccacgacaactgaaaaacaactcgccattttattacacaaagttgaaccagattgggctgaatctgcggttacaatgtttaccagtttattataaaggatacaactagaggggcggggcggtgccggcaagatggctgcgcccgaaaaggtgacatttccagagaaaccaagccacaaaaagtacagggccgccctgaagaaggagaaacgaaagaaacgccagcaggaacttgctccactgagggactcaggactctcacagaaagaggaggacacttttattgaaaaacaacaactagaaaagctatggggaagagagaggcaaagattacatgaggagtggttgctgagagagcagaaggcacaagaagaattcagaataaagaaggaaaaggaagaggtggctagaaaacggcaagaacaagagcgaaagttaaaggaacaatgggaagaacagcagaggaaagagagagaggaggaggaacagaaacgacagaagaaacaaaaaccggaagctgtccagaagatgctggatcaggctgaaaatgagttggaaaatggcgccacatggcaaaacccggaacccccccttggatttcagagtcatggagaaggatggagttaattgtcccttctacagtaaaacaggagcttgcagatttggagatagatgttcacatgatttcccaacatccagtcctacccttcttattaaaagcatgtttacagtgtttggaaaggagcagtgcaggagggatgactatgactccgaagcaagcctggagtacagcgaggaagaaacctaccaacagttcctagatttctgtgaggatgtgctgcccgagttcaagaacgtggggagagactgggcgcggtggctcaggcctgtaatcccagcactttgggaggacgcggcgggcgaatcacgaggtcaagagatcgagaccatcctggtcaacatgttgaaaccccgtctctaccaaaaatacaagaattagctgggcgcagtggtgcacgcccagctaatttttgtacttttagtggagtcccagctactcgggaggctgaggcaggagaatcgcttgaacccgggaggcggaagttgcagtgagcctagatcgcgccactgcactccagcctggcgacagagcaagaccccatctttaaaaaaaaatagtaattaaaaaataacgtggggagagtgattcagttcaaggtcagttgcaacttggaacctcacctgaggggcaagtatatatgttcagtaccagtcggaagaagaatgccaagcagctctttctctgtttaacggacgatggtatgtacgcaggacgacagcttcagtgtgaattctgcccagtggctcggtggaaaatgatgatttgtggtttatttgaaatacaacaatgtccaagaggaaaacactgcaactttcttcaggtgttgagaaatccaatagagacctctgcttgtctcctcctttggcaagagctccaaggggagagagagggtgggccaccacgatgaatactacaggctgcggggaaggagaaccctagtccagaccattcctacaaaagaaatggggaatccgaaaggaaaaggaagaaatctcactagcacatgtcaaagagccaggagaggcacaattcacctagcagaggaagaaatagtgaccgcagcgggggccggtgcagccgcagtgagaacggccggagccgtcacagccggagccaaagctcctctagatcccaaagtcgtggtaggaggagatcaggtagtagagacagaactgttcagagtcccaaatcccaataaacctgttttattcttacaaaaaataataggccaggcgcggtggctcacacctgtaatcccagcaattttgggaggccgaggcgggcagatcatctgaggtcgggagttcaagaccagcctgaccaacacggagaaaccccatctgtactaaaaatacaaaaaattagccgggtctggtggcgcctgcctgtaattccagctactcgtgaggctgaggcaggagaatcacttgaacccgggaggcagaggttgcagtgagccaagatcgcgccatggcactccagcctgagcgacaagagtgaaactccatctcgaaaaatagtaataataataataaaataaagaatacaacttagaaacagccaaatggaagccatgtataagacaaaggaagatgtgggggtggaaggggttgcgtggagcctccatgccctctctgggtgccattggttgactgggggaattaattccctggtgcttccagcctgcaaaatgagctcttgcaaccagtaagtccccgatcaaaggggtgcaggaggtggtaggtggaagttgaacagatggtaggtttgcatgtataagataacgccccaggggacatagcagctacacatggcaacccaaatatcctaatctccaaaaggaagagagagtggattcttggaacacaagtccacccccaaaggcatcccacaccagctcactcataaagctccaaggatgggccagaaaaacaagctctacaccaggggaaattggaggcatgacaagaaggacagaatgggacccagccttctaaaggaggaagaatctgacaaagaacagtcccagagattttgtgaaggtcgaaggatggagagaaggaactgtagcttaaaagggggtgaagttctgctacgcaggaggggggtttggggtggcaggggctggagaaagaaactgttcttcatccctggagcaggaggctgcggactttttgcagatccagaatttggcaagattacatttgtcgtcgttccagccattgccactaaattccgcgcagtcttcctccccaacgttgttgggctctcctctgttccaatactgcttgaagctgcaaagcccatgcggaatgtgagcctctgtccccgccagctacatgagctgtgtttctaccttctgtcatcttgatgccttaacatctgccctgcgtgtgtatgctggacttgaatccctctgcatacctgataatatgcctgactcacgatgccttgagttcctgcctctcttctcacaacctgtccttgggtggactccacctattgagtgtgtgattttcaaatacaagccaaccagtctggagtccacacctccagcgacctgccttactgggctcttgtactccaagccactatcctgtactaatcaccccaaggccaggtgtcagacagcgaggggcagcccctgtgccccagagcccaaaaaatgcttcacacttcccaatcctaagcctgttcacctggccttgacctttcctttccacagaaaccataataaaggctctggcccacagtcccccctccccaccactctgactcataacagaccctggtgcttccccaggtggcccccagctgtgatgtgtcctctctctagggatctgtgtatatgagaagctattcacaatggcaggtgtctcctgagctggtggccttactggacctcagacttcctattaatacattatattttaatacacctccccggtggcaggctcctcctgcagctctgctggtggaattctaggcacctgccatgctgtctggaagtgggtatgaagaccaccttcctcaactcagtaaaacctccagattcttgggtctagggtgtcagggagttggggaggatccccagggaaagttcaaatcagagtttcacaattccagccccagtggatagggtgccccttctgagatctacctgggcaacagaggtgagccgtccacccattgccacgtgccttcctgatttagatctgaaagtcccatccaggtgaagcggttacttctggaagactgcagctgtaggaagttctggagggtacaggaggagtcaggagggagctctgcttcccattttccaggctctgtctccccatctcttggtaggaagttctgcttgtaggctaacctacagccttctggtatactaggtcctgagccccctcgtgtctgagtccctctcacatgtgtatcccacggcacatgtgtcctgacatgcacacatccatgcacagctggcctctcctcacaccctcttgctaatactgcatgtttatccatttcacatgttctgtgcatgtccatgcacatttactcataactgggcttaatgtgttggagccagaggcaaccatttcctaactgctggtcatgcacatctcctttcagctctgcactgagtgacatcacaacgacagcttgaaatcagccaccatgggaatatttacaccagggaaactggcaaacacgacccatcaggacttcttcctccagagagctggttgttaacctcttgcagcatgctgcaggggtttgcttacatttgatgtttttttccggagcattcacacatgttcagatttggtttgtatctgctctaagggtacttgagactccctcattcatatccttctcctcccttctttccaagtggagcaaaacccctcttctgcaaagtcatctctgagcacctcctccccagttggccagaagccatgccctaggccaggacggggacccccaccaggtgtacctgctcctcagcacttttgattacgacgagctgggcccccacttctttgcaggcggtgatggagtcgtgccagttccgctgggagttagacatgaagtaacagtttccttggaagaatgtccattcccagggacaggggtggcacaggcgttctgttgggggaggctggtcagggctgggcttagattaggttgtccatattcctgtacctgcccagccttcaaggtcttgagagtcagagtccttccttgactgtccacgccgggtagaccattcccctccccacttcccgagaccctcccccatccccatgagaacccaggagtcctggccccatctcctccagactaggagaagttggggctttagaactcagaacagaaggcaggagactggcttaactgagtgcctgttgtgtacctggcccactgtgaacactgagggcaatgatcacagttaccctgtgttctcatttcacagatgaggaaacttgctcaggcagggtcagtgactcaagcaaactcacaccacacaacgaccatctcaggcccaagaagccctggttccagatactcacccactgcagccttcagctgggtcagctcctggtagatctcctgctgcttagatttctctggaagctcacccactgcagccttcagccgggtcagctcctggtagatctcctgctgcttagatttctctggaagctcacccactgcagccttcagccgggtcagctcctggtagatctcctgctgcttagatttctctggaagctcacccactgcagccttcagccgagtcagctcctggtagatctcctgcatcttagatttctctggaagctcacccactgcagccttcagccaggtcagctcctggtagatctcctgcagcttagatttctctggaagctcacccactgcagccttcagccgggtcagctcctggtagatctcctgcagcttagatttctctggaagctcacccactgcagccttcagctgggtcagctcctggtagatctcctgcagcttggatttctctgagagctcacccactgcagctttaagctgggtcaggttctggtagatcgcgtcttgcctggattgttcctgacttatggagctggggaccttggacactgggccaagaaaaaaaaggaactgcaattattaaacacctactgtgtgccaagccttgaactgagccccatagggacatcatttgtgagagccaaggtcttggttaatcccctttgaagatgaagaaaactgacacctggagaaggcagcacagaaggccaaggagagccagattcttcctgtcctcctcctcctccctctcctgtcctgccctagagtggggaggggctgtgggagaggcccctacagacccccagggacaacatcttggctctcagtcccacctccctcccagatctggcagccccaggctgtgtccacagccaaaagccaggcgtggggaccccagaccctcagaacctgcccctgaccttggacaaggagcccagccaagagcgtgaaggagaggagttgcagcaccaggggaccatggccaagacaccctgagagaggatacatgcgtcagcctgccagtgtccccaccggagcctggcccagggagagcctggtctaaatccctcagcaccccaggacccaggaaccccagccccagccccctccactccaacacctgggaatccaggccctagctctaacctccccaggacccagggaccccgtccccagcctccccttccccaggtcccaggaaccaggtacctgcttccacctccccaggacccaggaatccaggccccagcctctacattcccaggtccctggaacccaggcccccagctcccacctccccaggacccagggacccaggacccagcctccccttccccaggtcccagtaacccaggtacctgctcccacctccccaagacccaagaatctgggtcccagcccctacatccccaggtcccaggaacccaggcccaagtccccacctccccatgacccaggagtccaggcccaggcccccacctctccaggacccaggagtctaggcccctgaccccacctccccaggacccaggaacccaggcttcaacttctacctccccagaacccaggagtcttggccccagcctccaccttcccaggaaccaggaattcaggccccaaactcaacctcctcaggtcccaggagtccaggcccctagccccacatccccaggacccaagagtccaggccccagcgtccagctcctcaggacccaggagtccaggagtctctcgtctctcctcccaaactgctaagtcctctctacctgctaagctcttgtatcctcgagtctgtcggaatccaaggcctctcagctgttcctcctctgaatggatagacgtgaaatcagagcctgggcaggctgaggccatggctggccatcccttcccccttcccagaatcccagcgtcccaacccagcctcacccaggaggcccagctgctgcagtcttggttccttggagtcactcatgtcaccccactctcccccagtgtccagaactcctgggggccacagcttttatttcccaccctgtgatctttacttcctaaatctagtctcccacagaaagagaaacaggaagttgggtagggatctgtcatccaaaagactagtggaaagcatcagagcatgagatgggccggatctttcaagaatttcagggaggcagtgggggatggtctggggttgacagggagaaggactcatccactcatggatggctgagcagtgggatgcttttaatgaaatctgataaattgtaagagaaagctactgtgttacaccccctccactagggcaagggtaggcaggtagcacccccagttcctggaagcactgtcccctgtgacctcctggctttcctgctttgagctgctgctgtcctcatttttgggaattcctgctgactttgggagttggggcagaatcataattgcttgtttatttaatgcctagggtagtcaggtacttttccaacagctttataaactcattcatttaatgttcctacccttcagtagatcatatgacctccattatacagatgaggaaactgaggaggcactgcaagtttagctaactggcccaaggtcacacagctggtagatggtggggctgagacttgaacccagtctgcctccacagtgcatgctgttaaccaaagagtgaaatagtatcaaagaggaaagaaaagatccatagcagctttatttagaatgatctgaaattggaacaaccccgtgtccaccagcaggtgaatgataaaaaatataatggcatattcaaagattggaatactatacagcaatgaaaaagcaaagtactagtacatttaataacatagataaatctcacaaaacagtaaaaggacccagacagagtgagtacacactgtaagatttgattttgtgtgaattttgagaacaggcagaactaacctttgaaggagactcagaatgggaattatcaggaaggagcaggtggagattgacaacggggtttctgtatgctggaaatgttctatattttgatcatagagatgtgcatttaccacatgtgtgttaaatctcagtttaaagatggaaaatacatacatgtatcataatcaaatagtggttttcgacctgatctttactttgtattcttttttaaaatgttttaattttagaataattttgggtttatagcaaagttgcaaatgtaggaaagagatttcccatatgtaaatccctcacctagggatccctaatgtgaacccagtttctcctaatggtaacatttcacatggtaatgaggtaggaaactggaagaacttgttttctggccacaaccctgcagacccatacagaatctggtccagatgagatgatgtgaagaaaccagcaggaaccagcagatggcaacaaaagcaatccctggctgcctcattgctcgtgggcataagatactccctccagtgccatgactgtttaccgatgccatggcaatgacctagaagttcccacctgtttccatggaaacaacctggacatcttcgcccttttccttaaaacttctaaagaacctgctcctcaatttgcattgacccaccccttaactgacgtataactgaaagtgagttgacatgagtataactacagctgccaagagcttgtatgttgttgactctgggtgcactgcctatgagttagccctgcttcacaaggagcagtatcattacataaaaaatatctgtctaaggccaggtatggtggctcacgcctgtaatcctaacactttgggaggctgaggtgggcggatcacagggtcaggagttcgagaccctcctggctacatggtgaaaccccatctcttttaaaaatacaaaaaaaattagccaggcatggcacgtgtctgtagtcccaactactcagggggctgaggcggaagaattgcttgaacctgggaggcagaggttgcagtgagctgagactgtgacaatgcactccagcttgggcgagagagtgagactccatctcaaaaacaaacaaacaaaaccggtggctcacgcctgtaatcccagcactttgggaggctgaggcgggcagatcacctgaggtcaggagttcgagaccagcctgagcaacatggtaaaaccctgtctctactaaaaatacaaaattagccaggcatggtggctgatgcctgtaatcccagctactcgggaggctgaggcaggagaatcacttgaacctggaaggcagaggttgcagtgagccgagactgcaatactgcactccagcctgggcgacagagtgagactccatgtcaaaaacaaacaaacaaacaaacaaaaggtggctcacgcttgtaatcccagcactttgggaggccaaggcaggcagatcacctgaggttgggagttcaagaccagtctgaccaacatggagaaaccctgtctctactaaaaatacaaaattagccaggcatggtggctgatgcccataatcccagctactcaggaggctgaggcaggagaatcgcttgaacctgggaggcagaggttgcggtgagctaagatcgtgccattgccttccagcctgggcaacaagagtgaaactctgtctcaaaaaaaaaaaaaatctctgtctgacatcactggctcacccttgaattctttccagagcgaagccaagaaccctccccagctaagccccaattttggggttcacctgtcctgcaacatttggtgaccttgaaggaacaaagacagtgagcaagcggcagtgactggtgcagcactgccgatctgccgatggtgatcgccagtgagacagtgagacagtggggatcactgaagaattagtaagacagcagagacagtggcaattggtgattggcagagaggtgaaacagcaagggatggcaagacagcaagacggcaactggtaaggtggcaagaggcgcccgtcggtgataggtcagtgagacagagaggtggtgatcagagagtggtggagtggtggcaaagaaagaaagacagagaggtggtatattagtctgttttcacgctgcttgatgaagacgtacctgaaactgggcaatttgtaagaaaaagaggtgccttttggccgtaactgccatcttccagtaatttgccaaaatgatgaacgcaaaggggaagaggagaggcacccaatatatgttctctaggccttttagaaagcatggagttgttcctttggccacgtatatgcgaatttgtaagaaaggtgatattgtagacatcaagggaatgggtactgttcaaaaaggaatggaccacaagggttaccgtggcaaaactggaagagtctacaatgttacccagcatgctgttggcattgttgtaaacaaacaagggcaagattcatgccgagagaattaatgtgtgcattgagcgcattaagcatgctaagagctgagatagcttcctgaaatgtgtgaaggaaaataatcagaaacagaaagaagccaaagagaaaggtacctgggttcaactgaagcaccagcctgctccacccagagaagcatgctttgtgagaaccaatgggaaggaggctgagctgctggaaactcttccctatgaattcatggcatcagaggtgttaaaaaaataaaagacctctggattgtgaaaaaaaaaaaaaaaagaaaagaaaagaaaagaaagaaagaaagaaaaagaggtttaatgggcggttccacatggctagggaggcctcacaatcaggtggaaggcaaaaggtaagtcttacatggcagcagaccagagcgaatgagacagccaagcaaaaggggtttccccttataaaaccatcgggtctcatgagactgactcactaccacgaaaacagtgtggaggaaactgcacccatgattcaattatctcccactgggttcctcccacaacacgagggaattatgggagctacgattcaaggtgagatttgggtagggacacacccaaacgatatcagatggtgatcagcggtcagcaggatgatgattggtgagacggagaggcagcagttgacgagagacagcaagacagccatcagcactacggtaatcaaagctgcagagctgtaacactaaccaaggactctttgaagaaccatcatcttccctagcaggcaatggagctgagcagatgaacattcggctgtagtgccatgtgatgtgggaccagccactctgaccagcaggccaataggctactggtcccctgtgacagctgagctggcccaagctgggaaacctgggcacctggccttggtggagaagaccttcacccaggccctaagttggagaccagtcagtgccattttggctcctggggacaggtgagtgtcccctctgcccccgcctccacagtattgtgtgagccaggaaataagacttttggctagatagtcaattcaaagtcccctgtagcacatctgaccaactacgttcttttttttttttctttttttgaggcggagtcttgctctgtcgcccaggctggagtgcagtggcgcgatctcggctcactgcaagctccgcctcccgggttcacaccattctcctgcctcagcctccccagtaactaggactacaggcgcctgccaccacgcctggctaattttttgtattttcagtagagacggggtttcaccgtgttagccaggatggtctcgatctcctgacctggtgatccaccggcctcggcctcccaaagtgctgggattacaggcgtgagccactgcgcccagcccaactacattcttattaccccttttcttggtccttcctcctctaatgtcattttatttttccatcagccgtttattttatttcatcttgaaatgtatgttttgtttacagttttagtttttttgtttttgtttatcatatgatattacttatcatggatattacttattacttatcatcagccaagcttgataacttagctgaggtactgtttgtcatgtttctccctatacaacattatgatcaaataaagtttttttgacaaacacatggatggcatcagaaaatctattaataatagcataccatccgggcactgtggctcacatctgtaatcccagcgctttaggaggctgaggtgaatggatcacctaaggtcaggagttcaagaccagcctagctaacatggtgaaaccctatctctactaaaaacacaaaattagccaacacggtggcacatgcctataatcccagctacttgggaggctgaggcaggagaatcgcttaaacccgaaaggcagaggttgcagtgagccgagattgtgccattgcactccaatttgggctacagagtgagactccatctcaaataataataataataataaatcaaataaacaatttaaagtagaaaacctacatatcacagtagatcaaataaaagggttcaataaaactcaacagtgactcatgatttacatttttaagtcttcatcaactaagagtagaaggaaatatccttaacatggttgtggtatccatcaaacccacagcaaacaccatttctactggagaaactttagaagcattcccattgaaatcaagacaaatgaaaagaaaatccacaaacttgcaaaaatatttgcaagacatatataaagaaatcatccagcctgggcagcaccgtgagatcttgtctctacaaataatttaaaaatttagccaagcgtggtggtgcacacctgtagtcccagctacttgggcagctgaggtgggagattgcttaagctcaggaggtcaaggctgcagtgagctatgatagtgccagtgagcttcagcctgggaaacagagcaagacccaatctcaaaagaaaaaagagactcatattcaaagtaagtaaagaactcctaaaacccaacagtaagaaaacaacaaacctagtttaaagatgagcaaaagtacagatcaacaatggaaaaacaacccaattaaaaatgggcaaaggacttgactaaacatttttccaaagaagatatacaagtggccaacgagcacgtgaaaagatgctcgacatcactaatcattcaggaaatgcaaattaaaaccacaatgagataccacctaacacccactaggatgactactacaaaaaataataacgtggccgggcacagtggctcacgtctgtaatcccagcactctgggggccgaggcgggcagatcatgaggtcaggagatcgagaccatcctggctaacacggtgaaaccccgtctctactaaaaatacaaaaaaattagccgggtgtggtggcgggtgcctgtagtcccagctactcgggaggctgaggcaggagaatagtgtgaacccaggaggcagagcttgcagtgagccaagatcatgccactgcactccagcctgggcgacagagtgagattccatctcaaaaacaataataataataataatataataacataacaaataatggcaaagatgtggagaaactggaactcttgtgcattgttggtgggaatgtaaaatggtgcggtcaccacagaaaacagtatggcagttcctaaaaaatagaaataaaaatttcattacatataatccagcaatcccacttctgggtgtatactcaaaacaattgaaagcaaggactgttttctgttttatggtgtaattgtctagttttagtcttggcgtaatgtgggcctggtagaatgagttaggaagaattccttcctcttcaattttttggattagtttgagaatttatgttagttctttgtaagtttggtagaatttagcagtgaagtcatccagccctgggcatttctttgttgggaggcattttactttgattcaatctcattactcattattgttctgtttcaggttttctatttcttcctgtttcaatcttggtaggttgtccaggaatttatccatttcctctaggtcttctaatttggttagcatatagttgttcataatagtctctgatgattttttttctgtgtatttctgtggtttcaatcgtaatctctccttttcagttctgattttgtttatttgggccttatctctttttttcttggttagtctagatagtggtttatcaattttgattatcttttaaaaaaatttccttttgctgatcctctgtttttgtttttgtttttgtttttagtctttatttcatttagttctgttctggtttgtgttatttccttccatctaattttgggtttggtttggttttacattcctagttccttgaggtgtattcctaggttgtttatttgaaatctttctacttttttgatgtaggcattttgtgtgtttttttgtttttaagacggcatctcactatgttgcctaggctggtcttgaactcctgggctcaagcaagcctctcaccttggcctcccaaggtgctgggattactggcatgagccaccgcacccggccctgatgtaggcatttattgctttaaactttccttttagtgttgcttttattgtatcccacagattttggtatgctctgtgtccattttgatttgtttcaagaattttttttatttctttcttaaggtcttcattgacccagtggttgttcaggagcatatggtttaatttccatgtatttgtacagttttcagagttcctcttgttattaatttgtagttttactccattgtggtctgagaagatatttgatataattctgattttgtaaaaaatgtgttgtggcccaacatgtgatctattctggagtatgttccatgtgctgatgagaagaatgtgtgtgctgcagctgttggatgaaatattctgcaaatatctgttaggtccatttgggctaaattgtagtttaaatctgatgtttctttgttgatttttctgtctagattatctgtctcgtgctgagagtggggtgttgaagccccaaactattattgtattgaagtctatctctccctgtagatctaataagatttcctttatatatctggggctttggtgttgggtacacatatatttaaaattgttatatcctcttgctgaatcaatccctttatcattatataatgaccttctttgcctatttttactgtctttgacttaaagtctgttttatctgatatcagtgtagctactcctgctcactttttgtttccatttgttagaatttcttttatcatcctttcacttttagtctatatgtgtttttttttttaagagatggggtctcactctgttgcctaggctggagtgcagtggctattcccagacacaatcagctcattgcaccctcaaaaccctgggctcaagcaatcctcctgcctcagctccttgagtagtttggactatagacacatgctatcatacctggctagctttacaaaaatttttttagagatgcagtcttaccatgtggcccagacaggtctcaaactcctgacctcaagcaatcatccttcttcagcctcctcctgagtatatatacgtgtctttacaggtgaagtgagtttcttatagacagcatatagttgggtctttttaaaaaattcattcagccagtctatatcttttaagtgggaaatttaatccatttacattacaggttattactaatgtctgaggacttattcctttccttttgttaattgtttcctggttggtttgcatatcttttgttcctttctttctctcttattgtttgtcgttgtggtttggttgttttctgtagtggtaacatttgagtcttttctcttcttcatttgtgttttgctctaccaatgagttttatacttttgtgtgttttcatgatggtgatattgccctttcacttccaggtgcgggactttcttaattatttcttgtagggctggtctagtgatgatgaattccttctggttttgcttgtctgggaaagtctttatttctccttcatttttgaagaataactttactgggtatagtatttgatatggtttggctgtgtgcccacccgaatctcatcttgaattgtagttcccatagtccccatgtgtcgtgggagggaccaggtaaagataactgaatcatgggggcagtttccaccatgctgttctcatgatagtgaatgagttctcatgaggtctgatgcttttataaggggcttcctcctttgctcagcattcattctctttctttccaccatgtaaagaaggatgtgtttgcttccccttccaccatgattataagtttcctgaggcctccccagccatactggactgtgagtcaattaaacctcttttctttataaattattcagtcttgggtatgtccttcttagcagcatgagaacagactaatacagtaaattgttactgcagagactggagtgttgctacaaagataccccaaaatgtggaagcaactgtggaactgggtaacaggcagaagttggaactgtttggagggctcagaggaggataagaaaacgtgggaaagtttgaatcttcctagaaacttggagggctcagaagacaggaagatgtggaaaagtttggaaattcccagagacttgttgaatggctttgaccaaaatgctgatagtgatatggacaatgaagtccaggctgacatggtctcagatgaatatggggaactttttgggaactggggtaatggtgactcttgctatgcaaagagactggcagcattttgctgctgccctagagatctgtggaactttgaacttgagaaagataatttatggtatctggtggaagaaacttctaagtggcaaagcatacaagaggaagcagagcattaaagtttgaaacatttgcagcccagtgatgtgacagaaaagaaaactccattttctagggagaaattcaagctggctgaagaaatttgcataagtaatgagctgaatattaatcaccaagacaatgggcaaaatatctctagggcatgttggagaccttcacatcaaaggcctggaggcctaggaggaaaaaatggtttcgtgggctgggcccagggaccccctgttctatgcaaccttgggacgtggtgccttgcatcccagctgcttcagccccagctgtggctaaaaggggccaaggtacagcttaggccattgctttcagagggtgtaaaccccatgccttggtgacttacacatgggctgtgggcctgcgggtgcacagaagtcaagaattgaggtttgggaaacttcacctagatttcagagggtgtattgaaacacctagatgtccatgcagaagtttgctgcaggggcagagccctcatggagaacctctactagggcagtgcagaagggcaatgtggggttggagcccccacacagagtccccactggggcactgactagtggagctgtgagaagagggctactgtcttccagacctcagaatggtaaatccactgacagcttgcaccgtgtgcctggaaaagccacagacacccaatgccaacccatgaaagcagccaggagggggccacaccctgcaaagccacaggggcagagctgcccaaagccatgggagcccacctcttgcatcagcgtgccctggatgtgagagatggagtccaaggagattactctggaactttaaggtttaatgactgccctattgggtttcagacttgcatgaggcctttgttttggccaatttctcccatttggaatgtgtgtatttacccaatgcctgtactcccattgtatctaggaagtaactaacttgcttttgattttacaggctcataggcaaaagggacttgccttgtttcagatgagacttgggcttttgagttaatgctggaatgagttaagactttgggagactgttggaagagcatgattgtgttttgaattgtgaggacatgagatttgggagaggccaggggtggaatgatatggtttggctgtgtccccacccaaatctcatcttgaaatattattcccataattcccttgtgtcgtagaaggtaccagatggagacaattgaatcatgggggtggtttccgccatgctgttcttgtaatagcggatgagttctcatgagagctgatgcttttataaggggcttccccctttgcttggcactcattttcctccctgccaccgtatgaagaagaatgtatttgctttcccctccaccataattgtaagtttcctgaggtctgccaagccatgctgatctgtgagtcaattaaacctcttttctttataaattacccagactcgggtacgtctttgttagccacatgagaacaaattaatacagcattcttgcctgacagtttctttctttcagcactctgagtatatcatcccattctctcctggcctttaagttttcttctgtgaaatctattgttagtctggtaggggttttcttatatgtgactagatgtttttctctggctgtttatagaattctgtctttgtcttttattttttacagtttgactataatgtgccttagagaagtccttttggcctgtatctatttgggattctctgagcatcctatatttggatgtctaaatcttcctaggcttgggaagttttccgttattattttgttaaataggtgttctatgccttttctctctgatacacccaaaatttaaatatttggtcaccttatgatgccccatatattatataggctttattcattctttttatgctttattctctttttgtttttatctgactagattatttcaaaagacctgtcttcaagttctggaattatttcttctgcttcatctaatctttttttttttttgtagctctcaactgtattttttatttcactcattgaattcttcagttccaggatttccgcttggttcttggtaaataacttctatctctttggtgaatttctcattcatattctgaatttttttcctgatttctttgaattttttattttttgagatgggggtctcactatgttgctcaggctggcctagaactcctgggcttaagggaccctcctgcttagtgaggattataggcatgcatcaccaaaacactcaggtagtctttgtattgtttatccgtgttctcctgtatctaattgagattctttaggttcattattttgaattattcttcaggcaatttcacaaatttcgttttcattggaatctgttactggagaattattgtgttccttctgaggtgtcatatttccttgccttttcatgtttcctgtattcttacattgatatctatgtatgtggtgtagcagttgcttcttccaattttttggattggttttcataggggaagactttttgctgttgatgtatctatggtgttggttgggtaagtcactttagctttgactgggtgcatgcagcagtgtagtctctatatgatttctttaaccataaacatcatgagtggtatctgtaaattcctcagcatcttaggctgcagttgttagcagaggctacaatgaggctttgctggggataggggtgccatgtgagccagtccttgggtcccagtggtggcagcggcaggctgggtgtacctgtgcctcggcccctgggggggatacacagatgccagtagtggtgaacaaagtgaggtgaaccccagatcttcagagagcacgctttggtgctggtggcagttgttctgggcctgttttttgagatagagttttaccttttagcccaggctggagtgcaatggcacgatctcagcttactgcagcctctgactcctggattcaagggattctcctgcttcagcctcccaagtggctgggattacaagtatgcaccaccacacctggctaattttgaatttttagtagagatggggtttcaccatgttggtcaggctggtctcgaactcgtgacttcaggtgatccacccaccttggcctcccaaagtgctaggattacagccatgagccaccatgcccagcctgttctaggcctgttgttaggtctcctgatggtacatgcatgtgcctagggtgactgatagagcagagcaatccccaggacccctggtagtgtgcttggccacctggaggacagtgccaggccatgcaggcctgtcctcaggcccccccagtggcattcatgcatgcaggctgtgacgggaagggaaaggcactgtgcttgggtggtggtggctgcagtggtggtggatgggaagagcctgtcctcatggtgtctgcaggtgcaaggtggccctgctgctaggagtgggggtttgctgtcaatggcagcagccccaggaaggtgtctctcaagttcttgggactttgtctacctttgtcctggggacaggctccccactgtgctccactgcgctccactgcctgttccctggtacgtaagacattatgtgggctgcagcgctggggatcctgctacattcctgggtccaactactgtggcactgcggtagtcttctggatggatctgaagggatatcagttggactccatggacaaggagatgcaggggctgttgggtcccagggcaggatgtagtctggtggggactggcttctccaaatggcactgtgctgcaactacctgtgtgttgggggatgtgtggaacccagagtcagctccctctctggagtaatgttgtcacatgaactccaagcagcaccttatactggtctcatggcccatgagggttgaggagctctcccacagctaggatttcaggagttcatggtgggaatgtgcactgcaggggatctctcacttaccctgttcctgcactgggaaccccccaacctggtgctcccagctgatccaggctgggccagctgccttgtttccctccttccaggccacagatgtttcctatcacttctctgctgaattccagtgttttctcttagttgctgtattcaaagtgtgattatctacccactgtttaattcttctttggggaggaggtgagtgccagatgcctccaatctgccatgttgaactgcctctgtatttctcatttttaaattgatatataacacatttacaacacagtacacaagtcttaaatatatagttcaagagattttgacatatgggccaggcacagtgactcacacctgtaatcccagcactttgggaggccgaggagggcagatcacttaaggtcaggagttccagaccagcctgtccaacatgatgaaacccgtctctactaaaaatacaaaaaaattagccaggcatggtggcatgcacctgtaatcccagctgctcgggaggctgaggcaggagaatcacttgaccctgggaggtggaggtcgcagtgagccaagattgcaccactgcattccagcctgggcaacacagcgagactccgtctccaataaataaataaaaatacaaaaattagccagatgtggtggcgcacacctgtagtcacagctactcgggaggttgaggcagaagaatcacttgaacccaggaggcggaggttgcagggagcccagatcagccactgcactccagcctgggtgacagagcgagactctgtctcaaaaaaaaaaaaaaaaaaagaaagaaagaaagaaagagaagaaattttgacatatgaattcatccatgcagccacttctcagaaaaaaatatggaacattgtcagcagaaaatttccttctaccccattctggtcagtttacacccactccttccagaaagcccccaatttgagtcccatcaaaggttagttcttctgcctattcttgaaattcatgtaaactcaaaatcttacagaatgtattcattctgtttgggtttcttaactcttgtgagattcatccaaattgttgtttgtatcagtactttgctttttcattactgtatagaattccaccctctgaatatgccatgatatttgttttcattcacctgctggtggccacatgggttgttccaatttgggttgggatagtctaactaaagttactataaatctttctattttgcccttgatgttattagaccctctttggttaactgggtggagtgtggaggaaaactgcctggattcgaatctcagctccaccatttaccagctgtgtgaccttgggctagtttcttaatctcgcagtgcctctattttcccctatctgtaaactggaggtcacatgatctactgcagggtaggaaagttaaatgaaggagttttataaagctgttggaaatgtgcctatcataggtatgaaataaacaactatcgttcatctccaactcccaaaaacaaaggaaattcccatgaatgagagcatccgcagaccaaaagagcagatcctggaggtcagagggcatggtggttccaggaactaggcggtactgcctgcccacccctgccctacgtagggaggcataacaaagtcgctttccattagaatgaattgaattttattaaaagcatcccatcgctcaaccatgtcatgagtggaggagtccttctccctgtcaaccccagaccatcccccaacacctccctgaaattcctgcaaggtcaggccgatctcaggctctgactcctttcactagcctttctggtgatgtgatcttacccagcttcctgtttgtcttcctgagagacagtagatttagaaagtgaggatcagagggtggaaaataaaagctgtggtccccaggagtcctgaacatctggggacagcgggaaaacatgagtgactccaaggaaccaagggtgcagcagctgggcctcctgggtaaggctgggttggaactctgggatcctgggtaaggggaagggatggcccaggctctgagctgatgtctgtcaattcagaagaagatccaacaaccagtggcatcagactttttccaagagactttcaattccagcagatacatggccacaagagctctacaggtaggcaagagttagggagcagatagtggaagacagagcctcccagacccctgggtcctggggaggtaggtgttggggtctggaatcctgggttctggggaaggaaggtctgagacctgggttcctgggtcctgaagaggacggggtagggatctgaactcctcacacctggggaggtgggggttgaggcttgggttcctggggcctggggaggtgggagaggggttctggactcctgggacctacagaggtgggggttggaagctggacacctgggtccatgggaggtagggactggagcctggactcctggaaccagaggaggtgggagaaggggcctggattcctgggtcctggggcaggtgagaactggggactggaatcctgggtcctggggaggtgggagctgggaccagattactgggtcctggggaaggtgagaactggggcctgaattcgtgggtcctggggaggtagaagcaggtatctgggttcctaggacctggggaggtgggagcttgggcctgggttcctcctgggacctggagatgtggaggctgggacctggatgcctgagtcctggtgttgcaggataatttaggaatcacagagatcaaggggttgaggaggatttattattattattattatttaggtgcaccagcccagtcagattaacatccaaaaagactgagccccaaacaaagagtcaagttaccttttaagcatttcatggggtagggggagatctgtgcagggggaagcatattacagaagcgagaaacaaagatagttattcaattgagacatgcattacgtcatttcttatttttcaaggaaaaacatgttttacaacttgagtttatctgcctagtgaccttgcagctgcacagctagagaaacagggtcttcacaatgcctgggaaagggagagataaggctcactagccacacacagaaaaacaggcagttaattcttttttattttatttatttagtttttatttttatttatttatttattttttttgagacagagtcttgctctgtcacccaggctggaatgcagtggcgccatctcggctcactgcaagatctgcctcccaggttcatgccattctcttgcctcaccctcccgagtagctgggactacaggcgcccaccaccaccacgcccggctaattttttgtatttttagtagagatagggtttcactgtgttagccaggatggtcttgatctcctgaccttgtgatctgcctgcctcagcctcccaaagtgctgggattacaagtgtgagccaccatgcctggccaaaaaggcagttaatttttaaaggattccacctctttctcttcctcagggggaattgggttttcttacatacaactgagtttttgcttacacattctttaatttcttttcattcctgttccactggggaggtggacgcaggtacctgggttcctgggacctggggaggtgggggttgggacctaaactcctgggacttggggagggagaggctggggatggggttcctgggtcctggggaggttagagctagggcctggattcccaggtgttggagtggagggggctggggctggggttcctgggtcctggggtgctgagggattaggccaggctctccctgggccaggctcaggtgggaacactggcaggctgacgcatgtatcctctctcagggtgtcttggccatggcgccctggtgctgcaactcctctccttcatgctcttggctggggtcctggtggccatccttgtccaaggtcaggggcaggttctgagggtctggggtccccaggcctggccttttggctatgaacagagcctggagtggccaggtctgggagggaggtgggactgagagccaagatgttgtccctgggggtctgtaggggcctctcccacagcccctccccactctagagcaggacaggagagggaggaggaggaggggaagaacctggctctccttggccttctgtgctgccttctccaggtgtcagttttcctcatcttcaaaggggattaactgagaccttggctctcacaaatgatgtctctatggggctcagttcagggcttggcacacagtaggtgtttaataattgcagttccttttcttcttggcccagtgtccaaggtccccagctccctaagtcaggaacaatccgagcaagacgcaatctaccagaacctgacccagcttaaagctgcagtgggtgagctctcagagaaatccaagctgcaggagatctaccaggagctgacccagctgaaggctgcagtgggtgagttgccagagaaatccaagctgcaggagatctaccaggagctgacccggctgaaggctgcagtgggtgagttgccagagaaatccaagctgcaggagatctaccaggagctgacccggctgaaggctgcagtgggtgagttgccagagaaatccaagctgcaggagatctaccaggagctgacccggctgaaggctgcagtgggtgagttgccagagaaatccaagctgcaggagatctaccaggagctgacggagctgaaggctgcagtgggtgagttgccagagaaatccaagctgcaggagatctaccaggagctgacccagctgaaggctgcagtgggtgagttgccagaccagtccaagcagcagcaaatctatcaagaactgaccgatttgaagactgcatttggtgagttcctgcacatcaagggtccttgggcctgagatggtctctgtgtgatgtgactttacttgagttaccaaccctgcctgagcctcagtttcctcccctgtgaaatgagaacacggggtaactgcgatcattgcacttggtgttcacagtgggccaggcacacagtagacactcagttcaaccaatccgctgccttctgttctgagctctaaagctgctaattctcccagtctggaagagatggagccaggactcctgggttctcctggggatcagggagagtcttgggaagtagggagaggaatggtctctccccattccaagcggtccacccaacatggacagtcaaggaagggccctgattttcaagggcttgaaggctgggcagatatgggaatatggacaacctaatctgagcccagccctgaccagcctcccccaacagaacgcctgtgccgccactgtcccaaggactggacattcttccaaggaaactgttacttcatgtctaactcccagcggaactggcacgactccgtcaccgcctgccaggaagtgagggcccagctcgtcgtaatcaaaactgctgaggagcaggtacacgtggtgggggtcctcgtcctggcctggggcatggcttctggccaactggggaggaggtgctcagagaggattttgcagaagaggggctttgctctatttggaaagatgggaagagaaggatatgaatgaaggggtcccaggtacccttcaagcaaatacaaaccagatctgaacacatgtgaatatttgggggaaacgtcaaatgtaagcaaaccaccacagcatgctgcaggtgtttaacggccagctctccggagagaaaattcctgatgtgttgtgtttgccaatttccccagtgtaaatatttccactgcggctgatttcaagctgtgatgtgctgtcactcagtgcagagctgaaaggagatgtgctggaccagcaattagtagtgggtccaatgtggctccagtacatgaaacccagtcaggagtaaattcatgtggacatgcaaaatagataaacatgcagcattcacaggagcacatgaggagaggccagctgtgcatgcgtgcctgcatgtcaggacacacatgccatggggatacagatgtgagaggggctcagacatgaggaggctcaggacctgctatatcagaaaactgcaggttaacttgaaagcagaactttctgccaagagacggggaggtggaacctggaaaatgggaagcagagctccctcctgactcctcctctaccctccagaacttcctacagctgcagacttccaggagtaaccgcttctcctggatgggactttcagacctaaatcaggaaggcacgtggcaatgggtggacggctcacctctgtcacccaggtagattctgggagaaagggacactgtatccagtcgggctgggttcctgcaactctgacttgagctttccctgggggtcccccccaacctccctgaccccataggactaagagtctggggttttactgagttgaggaaggtggtcttcatacccacctccagacaggatgaaaggtgccaagaattccaccagcagagctgcaggaggagcttgccctgtgggtaggtgtgttaaaatacagtgtattaataggaagtctgaagtctagtaaggccaccagctcaggagacaattgccatttacacaaagtgagtagcttatcctacccacaggttcctagagggcgcacatttcacagcagggggccgctggggaagcagcagggtctgtcgtgagggaaagtcatggaggggactgtgggccagagcttttattatggtttgcatggggagaaaagggcaaggccaggcaagcaggcttcagatgggcagatatgaagcattttgtgggctctggggcatagaggctgcctagcggcctgacacctggccttggggtgattagggcagaaagatagtggcttggagtgcaagagcccaataaggcaggtggttggcagtacagaccccagactggttggtttgtattttaaaatcacactctcggccaggcgcggtggctcacgcctgtaattccggcactttgggaggtcaaggcgggtagatcacgaggtcaagagatcaaaaccatgctggccaacacggtgaaaccccgtctctactacaaatacaaaaattagctgggtgtggtggcgtgcacctgtagtcccagctactcaggaggctgaggcaggagaatcacttgagcccaggaggcggaggttgcagtgagccgccaagatcatgccactgcactccagcctggcaacagagcgagaatctgtctcaaaaaaagaaaaagagaaagaaaagaacaaaggataaaaaagaaaatcacagcctcagtaggagtcctcccaaggctgggatgcagcaagagaggcaggaactgaaggcaacatgactcgggcatattatgaggtgtggagagcaatgcatgtccagcatacacatgtagggcagatgttaaagcatcaatattacagaaggtaggagtgtggctcatctactgggcagggcagaggctcacattctgcatgggctttgcagcttccagcggtactggaacagtggagaacccaacaatagcgggaatgaagactgtgcggaatttagtggcagtggctggaacgacaatcgatgtgacgttgacaattactggatctgcaaaaagcccgcagcctgcttcagagacgaatagttgtttccctgctagcctcagcctccattgtggtatagcagaacttcacccacttgtaagccagcgcttcttctctccatccttggaccttcacaaatgccctgagacggttctctgttcgatttttcatcccctatgaacctgggtcttattctgtccttctgatgcctccaagtttccctggtgtagagcttgtgttcttggcccatccttggagctttataagtgacctgagtgggatgcatttagggggcgggcttggtatgttgtatgaatccactctctgttccttttggagattagactatttggattcatgtgtagctgccctgtcccctggggctttatctcatccatgcaaactaccatctgctcaacttccagctacaccccgtgcacccttttgactggggacttgctggttgaaggagctcatcttgcaggctggaagcaccagggaattaattcccccagtcaaccaatggcatccagagagggcatggaggctccatacaacctcttccacccccacatctttctttgtcctatacatgtcttccatttggctgtttctgagttgtagcctttataataaagtggtaaatgttgtaactgcagatccagcctcatctgattcaactttgtgtaataaaatggcgagttgcttttccgttgccataggcccccaggttgcaagttatgtgcactggtcatgcccagatgaaccaagcaggcaaccatgggcggaacctatgtgcttagactaaggaagggggactgagttaagaagtgaacaccacatggcatgatccatgatccaatcagattgagtcctggcatcactctatggcatgatccaattaggccaagcctcccacatcacctcattgcatgatccaatcaggttacacctcactaccctctgtgtataaaatcttcctcagcctccagctcagagagacagatttgaaccagattcctgtctccttgcttggctgtcttgcataaacttttctctctataaaaacccagtgttgggtcaggcatggtagctcatgcctgtaatcccagcactttgggaggtcgaggcaggtggatcacctgaggtcaggagtttgagaccagcctggccaacatggtgaaaccccatctctactaaaaatacaaaaaattagctgggcatgctgggcggtgcctgtaagcccagctactttggaggctgaggcaggagaatcatttgaacctgggaggcggaggttgcagtgagccaagatcgcaccactgcaccactccagccagggcgacagagcaaaactccgtctcaaaaacaacaacaacaatgacacacacaaaaaaaaacccacacagacttcgcctcccttctaccatgttgacctcaaggacattccttaataaacagcttgcttgctaaatcccatctcccttagagtcgacctgcaactggcatgagaactgtgaggcttgtttttgttgttgttttttgtttgtttgcttttgttttttgagacggagttttgctcttgtcacccaggctggagtgcaatggcacgatctgagctcactgcaaccttcacctcccaggttcaagcgattctgcctcagcctcccaactagctggaattacaggtacgtgccaccactcccaggtaattttttctttttttttttttttttgtatttttagttgagacagggtttcaccatgttgaccaggctggtctcgaactcctgacctcaggtgatccacctgcctcggcctcccaaagtgctgggattacaggcgtgagccaccataactggctgcggcttatttgatatcagtggtccccaccttatttggcaccggggaccagtttcatggaagacaatttttccacggaccaggggaaggggatcatttcaggatgattcaagcacattacatttattgtacactttatttctattattattgcactgtagaatataatgaaataattatacagctcaccatcatgtagaatcagtgggagccctgagcttgttttcttgcaaatagatggtcccatctgggggtgatgagagacagcgatggatcaccaggcattagattctcataaagagtgtgcaacctagatccctcgtgtgtacagtgtacaatagggttcccactcccatgagaatctaatgccaccgctaatccaacaggaggcagcgctcaggcagtaatgcaagcaatggggagtggctgtaaatacagatgaagcttcactcgctcgccctctgttcacctcctgctgtgcagcctggttcctaagatgccacggactagtactggtggcccaggggacagggacccccattctacatcatctaccagaggctcctggagaaactgagccccagttgcccacatgggtcataagctcgtccatgcctgtaaattggcttccttccttttcctacctgcccctcttcactttcccccttgtcttctggtacttcttggaacctcctcccagataaaccacttgtatcaaaatccttgtcacaggctttgtccctggtgaaactcaagccaaacttatagtatgttttgacacctgtcagtcatggttcttctccatcaaaatgttctcagagattcttgtgcaatttctttttttagatgatttttacatgactctagctttgaaggtcttactttactttttgaataagtcatgtgtgtgcctggaaccaaaacccatcaatctctacagtgataatgaaagctggctcccggctgggcgtggtggctcacgcctgtaatcccagcaccttgggtggccaaggtgggtaaatcacctgaggtcaggagttcgagaccagcctgggcaacatggtgaaaccccgtctctactaaaaatacaaaaatttgctgggcgtggtggcgcgtgcctgtaatcccagctactcaggtggctgaggcaggagaatcgcttgagcctgggaggtggaggttgcagtgagctgagatcacaccattgcactccagcctgggcgacaagagggaaacttggtctcaaaaaaaaaaaaaaaaagaaaaaaaagaaagctggctccctccccattctctgatctgaagaagttactcttcctagctgcaacctctttatcatattccagataatccacttgtcaaatttgtttaaaatctgtttggcaatccttcaaaagactgttgaaaatctatttgtgaataggtggagcacagaggattcttagggcagggaaactaccgtatgatactgcaacatcactacacattttttcaaatcacagaatgtacaacaccaagagtaagccctgatgtaaattgtggactctgggtgacaatgatttgtcagtgcaggctcatccattgtaacaaatgcaccactcactctgtcgaaggatgttgcataaaggttgttaatagtggtacaagcaagttgctcagatattaccttgtgttggtgctctccaaggctcagccctacccaacaaaatcttatgcgttgatatttaattttagggggcaattggcagaaatgtctatcaaggcgaatgtgaatgttttggggaaaacgtcaaaggtaagcaaatcaccgtggcctgctgcaaatgtttaacaaccagctctcaggagggaaagtatcagtgctttcagaaaacttaaagtacttttcagaaaacttaaaggccaggagagaatgggatgatatattcagagtgctgaaagaaagaaactgtcaggcgaatgatactgctgtaatcctttgcagtgagtcactaagtccagccccactcaaaggggtataagaatgtgtgaacatacgttaaaacctccatgctaattagtaagtatttgagggggaggtgatactttgaggttacggatctgctgcaactcggctcttgcctcatcagaggaaagaattcatccaagaagagtaagacagaaagtgagactgaggcaagttttagcgaaggagtgaaaatttattaaaaggttttacagcaggaaaaacaggaagtaaagtacactcttggaagagggccaaccaggcaatttgagagattgaggtgctcagtgcgacctttgacttggggtttaatgtgctgggatgctctggagtttcacatctcttctcccctgattctttcttgttgagatggagtttcattcttgtcacccaggctggagagcaatggcagtcttggctcactgcagcctctgcctcccgggttcaagcaattctcctgcctcaacctcccgagtagctggtattacaggcacctgccaccacgcccagctagtttttttgtatatttagtagagacggggtttcgccatgttggccaggctggtctcaaactcctgacctcaggtgatccacctgcctcggcctcccaaagtgctgggattacaggcgtgagccaccacgcctggccttccctgattctttcactggggtgcgctgtctgcatgcgcagtagcctgccagcacttgcggggggccacgtgaacagtgtatttactgaagttgtgcacatgcttatttcaggtgtttttccgttaccaatctagtggtcctagaggaaggtcatataccaggtaaactccacccaccaggtgcggtggctcacacctgtaatcccagcactttgggaggccaaggtgggtggatcactgaggtcaggagttcaagaccagcctggccagcatggcaaaaccccatctctaccaaaaatacaaaattagtggggcatggtgacatgcgcctgtagtcctggctatttgggaggctgaggctcgagaatcacttgaacccaggacacagaggttgcagtgagctgagattgcgtcactgcactccagcctgggaaacagagcaagactctgtctaaaaacaagcaaacaaacaaaacctctaccgattgcctcttggtgcacatgcttgagctgacttgcccggctcctgagatcttatcaggaagctgccaatcaccagctccaggtgttttctgtctattgggagcctgcctttccctaggaccagcggcccaattattattttagagaaacagtttaacaaccacctgatcatcaccttgtagcaggggggcgtctcccaccgggctcatgtctgcctacctacctactccctactctaaatggggagactgggccgggcgtggtggctcacgcctgtaatcccaacactttgggaggccgagatgggtggatcacgaggtcagaagatcgagaccatcctggctaacacgtgaaaccccatctctactaaaaatacaaaaaattagccaggcgtggtggtgggtgcctgtaattgtagctactcaggaggctgaggcaggagaattacttgaacccgggaggcagaggctgcagcaagaagagatcacgcaactgtactccagcctgggcgacagtgtgagactccatctcaaaaaaaaaaaaaaaaggccaggcgtggtggctcacacctgtaatcccagcactttaggaggccgaggcagacggatcacgaggtcagaagagattgagaccatcctggctaacagggtgaaaccccgtctctactaaaaatacaaaaaattagctgggcttggtagcgggcgcctgtagtcccagatactcgggaggccgaggcaggagaatggtgtgaacccgggaggcggagcttgcagtgagccgagattgcgccactgcactccagcctgggttacagagcgagactccgtctccaaaaaaaaaaaaaaaaagcaatttgggaagggctgagctttggagagtgccaagacatggtgatagctgagattctttgtggccctcaaagaaatagttttcttccccttgggagcaatgttaaccctgttgaggcacggaagagagtatgaaaagacaaaaagagagattctatagtagagaaacctggcagataccaccttaaccgaggctagcattgtcaataaaaggcatgttcacgtggatatcatacacacacccccataggatgtgactagaaaggcacctagcctttgtgatattctttttttttttttagatggagtcttgctctgtcacccaggctggagtgcagtggctcgatctcagctcaccgcaacctccaccacccaggttcaagcgattctctggcctcagcctcccaagcagctgggattacaggcgtgtaattacaggtccggcaccaccatgcccgggtaatttttgtatctttagtagagacagggtttcaccatgttggccaggctggtctcaaactcctgacctcaggagatccgcccacctcggcctcccaaagtgctgggattacaggcatgagccactgcacttggcctgtgatattcttaactccaaactaacaacctcgctctaaccattggagaacactagaaaaatccgaatcaaggaccattcaatacatgcctgatgaatactcttcaaatctgtcaatatcgtgaaagacaagaaacctgtcagcatttgcaggagatgcaggagaagtgatgactgatacgagctgaattttgtctcccaacaacttcatacattgaagtcctaacccccagtacctcaaaatgtacttgtatttggaaatagggtctttgtagagatgactaagttaaaatgaggtcatgagagtggattctaacccaatatgactggtgtcctttttttttttttttttttttgagacagggtcttgctctggcgaccagactagagtacggtggcacaatctcagctcgctgcaacctccacctccagagttcaagcgattttcctacctcagcctcccgagtagctgggattgcaggcatgcaccaccatgcccagctaatttttgcattttttagtacatgttgatctcaatctcctgacctcaagtgatcctgccgcctcggcctcccaaagtactgggattacaggcatgaggcactgcgcctggcctatgatgaactgtccttctaaaacggggaaatatggacacaggcacatacagaggaagacagctgaagacacagggaagaggggaccagatataaactaagaagagacacctgcagtggatccttcccccacagcccagaaggaagtaactctgccgacacgttgatcctggacttccagcctccagaactgggacagaatggatttctgttatttaagctcccctctccccagccagtggtgctcagttactgccgccaggcaaattccatcactacctgaatgcagtgtgggatcctggatgggatcttgccacagaaaaaggacacccatggaaaaactaatgaaatccgaacgagatctatagtttctagttcagagtattgcaccaatattaatttcttcactttgacatatgtacaatggtaatgcaagatgttaacatcggctggttgtggtggctcacacccataatcccagcactttgggaggccaaggtaggtggatcacctgaggtcaggagtttgagaccagcctggtcaatatggtgaaaccccgtctctactaaaaatacaaacattagccaggcatggtggcacccgcctgtaatcccagctactcaggaggctgaggcgggagaattgcttgaacccgggaggcagatgttgcagtgagccgagatcacgccattgcactccagcctgggcgacagagcaagactctgcttcaaaaaaaaaaaacaaaaacaaaaacaaaaagatgttcacattaaaggaagctgggcaaaagatatagagaaggctctgtactatctttgcaacttatctgtaatctaaaacgattgcaaagtaaaaagtttgaaaaaagactcaataaacctatttaggattccactctttaggattccacttatatgagctacccagagaaatttataatgaaagaaagtagaggccaggcgcggtggctcatgcctataatcccagcactttgggaagccgaagtgggtggatcatgagatcaggagttcgagaccatcctggccaacatgatgaaatcccgtctctactgaaaatacaaaacttagctgggtgtggtggcaggcacctgtaatcccagcaactcgggaggctgaggcaggagaatggtttgaacccaggaggtggaggttgcggtgagccgagatcatgccattgcactccagcctgggtgacaggaggagactccatctcaaaaaaaaaaaaaggaagaaagaaaagaaaaagaaaaagaaagcagaatggtgattaccagggactggggagaaaaaggaataggacttagcgtttcacagggacagtgttttagtttggaaagttgaaaaatcctggagatggatggtggtgatggttgtacgacaatgtgaatgagcttaatcccactgaactgtacacttacaaatggtcaatgttatgttatatatcgtttaccacaatttttaaaaaaagctctatcaaaaaatctatttaggatttttattgggatgagcatttgttttactctaggattttttttttttttttttttgagacggaatttcactcttgttgcccaggctggagtgctatggcacgatcttggctcaccacaacctctgcctcctttgtacttttagtagagatggggtttctccatgttggtcaggctggtctcaaactcccgaccttaggtgatccctgcctgccttggcctcccaaagtgctggaattacaggcgagagccactgtgcctggcctactctaggatttttaggatggaggaaacccattcaatgattaggagagacaagaggtggaaataaaggttgtattacttaggggtcctgggtagggagggcatggcacttccagaggccacaaacacacatatacacacacacacacacacacacacacacacacacacacacacacacacaggtcagggagagcttttgcagggagacagaggggaagcaaccagtgtgacaatgccgtgattaggtccagggtgttatccacacaggtttccctcagggagttttaattggtgggtttcatggaagcaggcgtgagtctcaggaggtcaggctgtgactgagaggtggtcactgcaccatatctgcagtccgtgtaagatgtggatgggtggtgtgggggcctgcagagccaatcaataggctgtgtccagctgccccataggcaggtggtcatcggggggaagttggataaagcagatctggatcaaccacattgaggaactaggagcaggtggggaactggaaactgtgtcaaggctgactgagccctgtttttggaaggagagtcaaacatattcagaaaggggctgacgcaacacaaattagaggaattcactacagcattcgatttataaattcattttggaagaaatagcctttctgaaatactgagtgttttggggggaaactcatcctgtgtctttctttattcagatcttagttaagcatgggagatttacccatattcttcttacgactattctttaatgtttaaaagcttttcttgccctgtgaacagggtttgttttctcctgcgtttgcaaatactcgttacttcaaccaaacaaagctgctccttttatagagaaatcttgctgtgagctctaattactcctgaagttaagcctctagaacttcctagatacgtgattatggcttcaaactacagtcagctttgactcttgctttcaatatatttataggtcttatttatttatttatttatttctgtctctctttttttttttttttttttttttttgagacggagtctcgctctgtctcccaggctggagtacagtggcgcgatcaaagctcactgcaacctccgcctcccaggttcacaccattctcctgcctcagcctcacaagtagctgggactacaggtgcccgccaccaagcctggctaattatttttgtatttgtagtagagacggggtttcaccgtgttagccaggatggtctcgatctcctgacctcgtgatccgcccgcctcagcctcccaaagtgctgggattacaggtgtgagccaccgcgcccggtctttttttttttttttttttttgagacaaggtctcgctctgttgcccagactggagtgcagtggcacagtcatggctcactgcagccccaaacccccaggctcaaatcctcccacttcagcctcccaagtagctggaactacagatgtgcaccaccacacccggctaatttttgtattttttgtagaaacggggtctccctatgttgtggaggcttgtcttgaactcctgggctcaagcagtcctcccaccttgaccttccaaagtgctgggattcacagacgtgagccactgtgcctgggcttctttttattttcttactgcattgggaaaacagcaagagggccatctttattttgttcttgactttaccaaatgcagttctcatatttaattattaaggagtttctgtaggattgtggaaattgccccttatcccaccagtatcaggcagctaggggctgttgtaagcaactaccatgaactgggaggctccaaacaatgctaatttattatctcacagtcccggaggccagaagtctggaatcaaggtgtcagcagggccatgttccatctgaatcatgtaggggagaatccttccctgcctctccctagattctggtgattgcctgttgggagccgaaaaggccaaagggatcgtgaccaactcagcattccactggaagctgtatgatcaaacagcaaagtgtttatcatgaacgcaggatgtgggcaaactcacgactgcgcctaccgccagaaggtttgctgagggcaatcactccctggcaccacgctcactggggttatctactgggacatctagagcctattgctcgaagaatgcagccttgcaagcctgctgtaaatcaagccgctgactgacaaccaccccccgcccccatctcctttacccaataaaatgcaaaggggtctaaagctcaaggtacttgttcactagaaagaagcaaggagccccccgaccccttcttccaaatatactcttttgtctttatctttattcccacattcatcatcctttgttcagtccaacagggatggaatccgtggcaaagtggcgacccagaacagggacttgaggacgttgcaaagtggcttctgaacacagagaccggaggacgtgaacgaagaaggtcggctggagcagaggaaccgaaaacgacaagatgaatggggaccccgagacaagcctgccagcagcggatataaggtcagtgccctaaagaagtactgggaacgggaagttttctgaatcagggtaacatgcggcagaatttgtctgttgaagaaaaacatgtgcacttgcttcaagttctgttgagacagtctggagctcaggttaattcgcagatactaaccaacctcctgcagaagccacaaatggttattaacgcataacccatggtctccacaggcaggcactcttgatgtggaaaactggaacagagcgggagaaggattgaaacatgctcatcaaaaaggtcttaaagttgattcttctgctttctgtacttgcagtctaattcgtactgtacttatgccgttatctccttattattctgcgggacagcaggctgagtctaaaaatctgaaagaatctgttgtcccacccacagcttcaattgaaaataaaaaacaggagagggaggataaaaattggcctatactgcctcctccagttgcagaaacatctgtgccgcctccttcggtagcaggaatagagaccccaatacaaagaattttacgctctgctgccatagctggagagccctcaggaccttgtgcttttcctatttccgtaaggcccgattcaaataatccacagcagtttattcatgaacacaccccactagagtttaagttgttgaatgaattaaaaaccagtgtagttaatatcggggtacagagcccattcactttaggattgccagaatctgcatttggtgctatgcgtcttctaccctttgatgtaaaacactgggctcgaacttgcttgtctgctagtgcatatctgacatggaatttaaatgggcaagaaatgtgtacagaccaggttagacagaatcgtgctgctggacacggagacatcgcagaggatatgctattgggtaatggcccttattcagacctggaacatcaaatggaactaaacgcgcctgggccacaattcctgaagagggagtcccagtacaatcctttttacctttcatggaagggtcacaggagccctctgcacaatttcttgcaagattacgagaggcagtgaagtgtcagattcctcatgccactgccgcagaggcgctaaccttaactttagcttctgagaatgcagacgcagattgtaaacgtgcactggcacccgtgaggtgtactaaaaacttgggaaattttctcagagcttgtcaggatgtaggaattgagcttcatcgctctgcaatgttagcggaagcaatggctgatttagtagttgacaaatctaaaaggagccaaggattaagccctcaagtgggaaaatgttataattgtggaaaaactggacattttgaaaaagaatgccgccagatctcaggacagagaggaccttataatgcagtaccccccccctcagtggaaaaaacgccaggacttttatttacttttatttacccaataaaatgtgaagggctttaaagctcagggcccttgttcagtagaagcaagaagcccccgacccctttttccaaatatacttttttgtctttatctttattcctgcatttatcatcctctgttcactacaacagggatcaaggtcagtgacagttgccgacaacctttggcattccttggcttgcagaccctttgctcgactctctgcctcttttgtcacgtggctttcttccctcttgccgttttacataatcttctctctgtacctttctcctcctcatataaggacatagtgatactggattagggaccactctcatgacctcaccataatgtagttacatcagcaaagaccctatttctcggctgggcacagtggctcacgtctgtaatcccagcactttgggaggccgaggcaggtggatcacctaaggtcaggagttcgagaccagcctgaccaacatggagaaaccttgtctctactaaaaatacaaaattagccgggcgtggtgacacacacctgtaatcccagctactcaagaggctgaggcagcagaatcacttgaacccgggaggcagaggttgcaacgagccgaggtcttaccactgcactccagcctgggcaacagagtgaaactccatctcaaaaaaaaaaaaaaaaaaaagaccgtgtttcccaattttaaaagtcacattcacagataccagaggttaggcattcagcatgtctttttgggagctataaatcaacccactaaaccacggacatctttatttgttcttcattttacctaaaatgtttctcatattttagtgttatgtaagatatttctgtaggatcccagaaattaccacttctcaaattaagaaagctttattctgttctctctttattaagcatttagtttttgtgcctgtcttcatttttaaatgaataatgggtattgaatagatatatctcataaatgtaatgtagagaggacaaaaacaagttacggaaggatatagaccatgtggtaacactcctgtaaagttttcagatgtgcaaaacaaaccagcataggtcaggcatggcagctcatgcctgtaatcccaacactttgggaggctgaggtgggtggatcacctgaggtcaggagttcaagatcagcctgaccaatatggtgaaaccccgtctctactaaaaatacaaaaattagccaggtgtgggggagtgtgcctgtggtcccagctattcaggaggctgagacagaagaattgcttgaacctgggaggcagacgttgcaatgagccgagatcgtaccactgcactccagcctgggtaacagagtgagacttcttctcaaaaaaaaaaaaatccaaaatattgtccttgggtacatgcataattattttaaataggataaacaccaagtttgggagggcagttaccttggggaggggaataggagcagggtggggtacaagggacctccactctatttgttatgatttgttacgtaatgatgctttacttttaaggtgatctgaaatacatgaagatgtcaaaacttgaaaaagccgagtgaaaggcatagcgtttatatttgtttctacaaacctctttgcatgcttcgtaataaaaaagcaaagccaaaattcagagcgacaaccaatgtgccacatgccctttgcagtgggctggcttccctggttacagcaaccctctcatctctgcagagaatggaaaccagagtggtcatggccttggagctgaatcttgtgactttcaccttcttcccacatttgtccaaacctcttgtccctgctcttcaggtccttgtgtgatgtgacccagctgacaccctagccccagatgactgcccctgaattagtctcagcttctccaacctgttcccttatcctctattcttgcatgtgctgataccgtattgagaacgttctttaatgttatttatctcctctggaataattctgactccctcctcaagcatcacctcctccaggaagccctctcggatcctccaggctcagccagtgtctccagtggtcctcacagtctcctgtacttcccaagctcatcatattgtcttcaaattccgtggttacatgttccccactcgcctgagaaacaggcctcccttccttgtcctgggccagggatagatgtggaggtctgctgcctccttctaggacctctcttccgctctcagttaccccgcagcgaggtctgggcacaggacattgatgggcagccttctggcttcctcactaagctggacagctccgccctggctcgccaaggcagcttcagccacaggtgtatccagcagagcctctatctcctccataaggtctgatgaaacactgccatctaaatcctttccccagaacacattcctatggttgccctggacagagattgtgcaatccttgcagtttttctgatttcctccctttgagcacctgtccctaaaagcctcagaatgaagagggcgtgccctccaaaaagttcctgccctacggttaagcctgctgctaagtcagctttcagcgctccgtttctgatgatgaaagcaagatgagtcagatggtttgggaacaagggaacttctagaaagaagagtctaggaagctaagttttgttaacccttcagcgtctcctaagcactgctaacttttaatgtttaacccttcctcctccctctgtaccatagacatccattctgatgtgtttgatacatgcccttacattagttttttaaggaaaatatgcttacatttgcctttcttattgctataaatttatggggtacaggtgtaattttgttgcatgcatagatttcatagtagtgaagtcatatccttaatatttatacatacttggagtgtgtgtgtatgtgtgtgtgtgtgtgtgtgtgtgtgtgttattgaatcaaatcatttctgcttctcccagctctaggctactaagaatctggactgctgctgcctgtacaactagttgattacgatttgtttcatgtgtgtactcactacactttacttactctttgcctgctcagggtcttgtaggttacccccaactctgctactgtaaacaacactgtgttgaacatccttgtaaatgcccttggagaaaccttctctaaaaagtatctctttttaaaatatcagagggtatatgccacctgtatttcactacatacttccagactgttttccaaattactgaactaatttatacttccaccagcagtgagcaacagttcccacttcctcacatcttcaccaacacttaatactatgcatctttttaatggttgcattttaattggtataaggttgtacctcattattttttctacaattaagtagacattaaactttcctgaaatatgtgctcaatctttggcttcttctatgaattgccttttcattcccctggcccatttttcaattgatttttgtgtgtgggtgtttctttgtttgttttgttttgttttttgttttgtttcttgggacagagtcttgctctgtcacccaggctggagtgcagtggcacaatctcagctcactgcaaccaacctctgcctcccggttcaagcaattctcctgcctcagcctccagggtagctgagattacaggcgcccaccacgcctggctaatttgtatttttagtagagacgaggtttcaccatgttggccaggctggtctcgaactcctgacctcaggtgatccacctgcctcagcctcccaaagtgctgggattacacatgtgggccactgcgcctggctggcccttttatgttaattcttctgacctctggaaacattagctatctttatccaaatcctttttacagtattctctaattgaatttaaatttttttctctgcagatatgtcctgtgcattttttttatttttattttacagtcttcctctattacccagctagagtgcagtggcactatcatagctcactacagcctggagcctcgaactcctgggctcaagtgatcctcccacctcagtcttcagagtagctgggactacaggcgcatgccactacatttgactaatttttgtattttttgtagagaggagggcctcaccatgttgcccaggctggtcttgaactcttgggcccaagcgatctacccgcctcagcctcccaaaaggccgggattacaggcatgagccaccgcacctggcctctggtgcattctttattgattcttagatacacgataatttgagttgctattttagaggctttatttttcattaactttctagtttgttgtttctattaattttagtaatgtaatcactctgtgcaaatgctcttcgtagttgcaatctttacatttattcctctatgtaggtgataatatttttttttttttgaggtggagtctcgctgtgtccccgaggctggagtgcagtggcgcgatcttggctcactgcaagctccgcctcccgggttcacgccattctcctgcctcagcttcccgtgtagctgggactacagtcgcccgccaccatgcccggctaatattttgtatttttagtagagacggggtttcaccttgttagccaggatggtctcgatctcctgacctcgtgatccgcccacctcagcctcccaaagtgctgggattacaggcgtcagccaccgcgcccggctggttataatattttaaaatacctggcacatggcaggtattcaatgtttgttgaaagaatgcatgaacattgagagtttttgatgaacctgagatggttctgggtagacatgcgtaacttcattgtttctcggtgtttctttgagagaagccccgtcactgtactcttttcagggttggtaaaagaaaactggggcttctaggctggccgccgtggctcacacctgtaatcccagcactttgggaggtcaaggaaggcggatcatctgaggtcacgaattcgagaccagcctgtccaacacggtgaaaccccatctctactaaaaatacaaaaattagccaagcgtggtggcacgcacctgtaatcccagctacttgggaggctgaggcaggagaatcgcttgaacttgggaggcggaggttgcagtgagccgagattgcatcactgcactccagcctggacaacaaagggagactctgtctcaaaagaaaaaaagaaaaagaaagttgaggcttcctgaagctacacactgcacagccccatccgccacccaccaagtggtagagtcctgcagctcagcagaccacctcctcaacaaaacctctgtttgctctcttctggcacagagggagtgaatcaaggtcaggttcagacccagcctctgaggagggacctgaactggcctggggagctacgccttgggggctttctcaggagccagcaggggttacaatttggtcgggtccagtgtgtccctctcaggcggaaacccagccccaggcccataagagaggggtccaagctccaaagagaagcctccagcaccagcctggggatggagctgcagcgacgaggaccgggaagctggaactacctcaccccgagcccagctcagcccagcccagcccagaaagggcccaaccctgtgattggtccaaccctgtgatttgtccttgggtccctgttgccaggaatccaggccaagaaaatgagaaggaaggaagggagtgcgtaggtccagtgaggacgagggtgaaatttatatctctgcccaggtctcggtgcctgcaccgccatagacaccaccaggtacagcaactggggcgggagctacgaggaggtccccggaggtatgagcaaggagactgccccatccctgccccggtgtctggggtttgatgggggaggggagggaagagccaagacgggccagagtcgtgggtgcaaaaaaaacaacacagagccagttggaccaggggccaattccaactctgccacttagaagctgtgtgaccataggcaagttacttaacctctctgaaactcagtttcctgagaggaacccaggcctctagggctcagtcctgggggacccagcatgccgtccttgttctgccagggcactggggacgctgggtgcactggagcccgagacccctcttcctggccatggctgtcctggtcgccagtactgtgggctgtgattctgagtatcctattgtccaagggtgagtgaccctcaatggggaggggttgcgtctggcccccctggggacacaaaacccccactgcatggcgcaccaactgcgccctggcgtcttgctcgcgtctgagcgtgagcagagtgtgtgtacatctttgggccgtttgcagtcacgcgtgtgcacatggcgtgcacgtatgtgtgcgagtccccacgcgtttgtctcccatcggcgtgtgtgcacatagtgtgcgctatatgcctgcctgcccgcccgctctgtggtcccgagtcgggggaccccgcaccccccgggcaagggaaggatttccgagtccctggccttgcctgcaggagcctctctccgcagcctccacggagcgcgcggcgctgctcggctgccaggacctgctgaggacaaacggtgtgtgcagagccgggcgcctgggcgcccggggcgtgtgcggcgggagcgtctgagaccccagagatggagtcctgggtgcgtgggggccctgtggtccctgagtctggccacggggtgtggaagggagtcccctgagtcctcccaagtgacccggcgggcatgcgttttgggatgggggtcgttccagcctcgaagcagacggcggcgctgggtgccctggaggaggaggtgggagcctgccacagctgctgtgagggggcgcggcccagactatgggcgcaagggtggggtcttgtggccgggatgggaggggggccggaggcgaggcctgcggcgagtggggcggcggggggctggtctccgaagtcccgccccatcctcgcctccctcgcccctctcaccccgcggctcccaggctcggggacgcaggcgctgctgcagaccacgagcgcggagcttggggaggcgcaggcgaagctgatggagcaggagagagccctgcgggaactgcgtgagcgcggtgagggcccgacgcgaccccagccctgagccctggccgcgtcccccgaccccgaccccgaccccgtcctgagtgctgacccctgacactgatcatgcaccccgtcctgaccctgacgctgcactctgaccttgactgccactcctagcgccggccacacccggaccctgcccaggtgtaaccgtccttgaccctgtgccatcctggtggctggcaccgagggtacaatgaccacggacaggggtcctgacctttagctagtcctgaccttgagcccaaccaaaatccccattcccttgaccccgcagtgacccatggcttggctgaagccggcagggaccgcgaggacgtcagcaccgagctgtaccgggcgctggaggccgtgaggctgcagaacagtgagggtgagggggggtaggagggggtgcggtgtaagtggaccctgcccgtgtgcgtcgccggaccccctctttgaccttggcctggtcctgtggctccacccctgagcccgtggggccaaacccctaccccctgcatcctcttggtgcgctctccctggaagcactcgacctctctgacccttgccaccctacaggttcctgtgagccgtgccctacgtcgtggctgcccttcgggggctcctgctactatttctctgtgccgaagaccacgtgggcagaggcgcagggccactgcgccgatgccagcgcacatctggcgatgtagggggcctgggggagcaggtgcgcaggaggaggcggcgttcacccgagggggcgtggccgggcggtggggcggcgccgggggagggggcaggacgggtctgactctgcaggctcaggtgtctcctcctttctaggacttcctgagtcgtgacactagtgcccgtgaatactggatcggccgcagggccgtgcaacacctgcgcaaggttcagggctactcgtgggtggactgagtcccactcagcttcaggtaggggaagggctcctggtgaaacctgggggccacaggttagactctagaggacatgttttgaggccgaggtgggcggatcacctgaggtcaggagttcaagaccagcatgggaaacgtggcgaaaccccatctctactaaaaatacaaaaaattagccgggcgtggtggcacacgcctgtaatcccagctaaccctggatgctgaggcacgagaatcacttgaacccaggaggcagaggttgcagtgagccgagattgcgccactgcactccagcctgggagacagagttagactccgtctcaaaaaaaaaaaaaaaaaaaaaaaaaaaaaaaaaaaaaaaaaaaaaaagtcatgctttggccagatctcagggaccccttggctggggctccatgcttagggatgggcaggctggaccctaggaagtgtccttgggttaaattctgggcgttagtaagttatatcccaggtgtatactcaggttagacacttggggtgtctagcgtagacccaggcaataaacaggctagagcctgggaaggaagtgggggccccgggtccatccctagcttagattcccagcatcaccccccgcccggccattcaaccactgcagccactggttacagggggaacgcaatgaattttgggggtgcgaggcctgtgtcatgattctgggcatggggctgtggatagacccaccacgtgatgagaaggctggccggatctgtcagcagaggcacggtgctgaccccgcccggtgccccagagccgtgcccagtgcccaaaggggtgctgtgcaccatcccggctactggaacccactgccaaggattttcttttccccatccaccactgctgagaaccaatcggccaggcccagccctgtccggtgcctgcactctgggacctctgctctgacttcatgcaaacctaacctaaccttcactggctccaaaatctccatttctggatcccagtggtctgaccccacctctcctcctagccaaggtcaggcaactgaggaatggagctatttggttttcctgcactttcccgcaaaggggaaaatggtacttcctgcaaagctctctttgcagcctgggggagcatcaataaaggtttgagaaatggatccaggctcctggctctggtgagctcttatttatttatgtatgtatttatttatttatttatgtagagatggagtctcactctgtcacccaggctggagtgcagtggcacaatctcagctcactgtaacctccgcctcccaggttcaagggattctcgtgcctcagcctcccaagcacctgggattacaggcgtgtgtcaccatgcctggctaactttttattttttagtagagacaggatttcaccatgttgcccaggctggtctcgaactcctggactcaagtgatctgtctgcctcagcctcccaagtagctgggattagaggcatgcacgaccccacctggctcaattttgtattttttatagagatggggtttcaccatgttccccatgctggtctcaaactcctgagctcaatcgatccacccacctcagcctcccaaagtgctgggattacaggtgtgaaccaccatgcccggccctctggtgagctcttctaagcttcatcccagaagccctggtgtaaaccttgtgagtgacccctgatctctctaagtgacctcatagtcctatgatgcttccaaacccagtgggtaacctgcactaggccaggagggcttgaaggtaggggcagttgtccactcagcactgttaaaattctcagccccctggcacagagtgtggttcagagggttctggggacacaggaatgggtcaaacccagtccttatccccaggacctccacattctggtctagctgggcacaggaacatgatccgtgcatggagcgggtagctgatgggcatgggggagccactttttgttggggtccagcctcaacactacccgtaggtagccaaagtccagtggtgacaaagaatgagaaaagacaaattaagattttaggcctggcgcggtggctcatgcctgtaatcccagcactttgggaggccgaggcgggtggatcacgaggtcagaagattgagaccatcctggctaacacggtgaaaccccgtctctactaaaaatacaaaaaattagccaggtgtggtggcgggtgcctgtagtcccagctactcaggaggctgaggcaggagaatggcgtgaactcgggaggcggagcttgcagtgagccgagattgtgccactgcactccagccggggcaacagagtgagactctgtctccaaaaaaaaaataaagattttaaagctggtccagggggccatttgccagagtgaaggctgcaaaacacccagagctctggttgcctgacaatttattgagaacggtcttttgatctaagaagcggctggtatgggatgaaacggtgaaggagggggagtgtacgtcattggaaagatctgtagcagtagcagttatatgaatttcctttaagctaaaagcatatgtctaactacgaagataatcttcaacttatcaggctgcagctggtggggactggttttacaaggagccaggatgtctggtcacattccaatgcttcaagggagtttttcagcccagagcattctgtgtaaagccgcagagcaggtcatgctctctggccagggaacttaatggcttggggagatgattctcctcaagggccccctactgtagggaccagccccacagggtcggtgggtttttctcccaatgtgtgaagatgagagattgtaaaaataaagacacaagacaaagagataaaagaaaagacagctgggcccaggggaccactaccaccaagacacggagaccggtagtggccccaaatgccaggctgtgctattatttattggatacaagacaagggggcagggtaaggagtgtgagccatctccaatgataggtaatgtcatgcgagtcacatgtccactggacaggtggcccttccctgtttggcagccgaggtggagggagggagagagagagagagaggagacagcttacgccattatttctgcatatcggagacttttagtactttcactaattttgctactgctatctagaaggcagagccaggtgtataggatggaacatggaagctgactaggagtgtgaccgctgaagcacagcatcacagggagacggttaggcctctggataactgcaggcaagcctgactgatgtcagaccctccacaagaggtggtggagtagagtcttctctaaactcccctggggaaagggagactccctttcccggtctgctcagtagcaggtgctttttccttggcactgacgctaccagtagaccacagtctgcttggcaacggggcatcttcccagatgctggcattactgctagaccaaggagccctctggtagccctgtctgggcataacagaaggctcatgctcttgtcttctggtcacttctcaccatgtcccttcagctcctatctctgtatggcctggtttttcctaggttatgattgtagagtgaagattattataatattggaataaagagtaattactacaaactaatgattagtgatacttatatacatatctatgatctgtatctagtataactcttgatattttatatattttattacactgaaacagctcgtgccctcggtctcttgccttggcacctgggtggcttgctgcccacaccctacatttttccataggtgtcctacacagggacgactgactaaactggcaccccataaacctttccaccagcacttgcccccttttctttttattaataactgccattgctatcatggcttgctcacagtgtctggcttctctcccaaggtgtcttcttcacctgtagactaaacataaacagcatagacaaacaaaaattaaagcaaagtttgcagcagttgatcccccaatggttttaatccatttcagaggattcaggtcagagaacccatcaatggttccattaaagacatcagcaccaggtaagaaagttaagtgggcttgagatgcctcaaaaacttgttcctttaattttgctatatccagtgtgggttcacgccattctcctgcctcagcctcccaactagctgggactacaggcgcccgccaccacacctggctaattttttgtatttttagtacagactgggtttcaccatgttagccaggatggtctcaatctcctgacctagtgatccgcccgcctcggcctcccaaagtgctgggattacaggcgtgagccacctttccctctaaatggtgtttaaccttatcccaatgaggcacagaggcattataagattgaggagtaatgcaaaaatcagaagtattccaatcaccctgcatttgtattctatgctccaagttcataattcgatcccccatccaccgtactgtttgacaaagatcgttaatttgattagttaatttttgatcaatttgcgtctgtgtattccaaagcttggaagaattcttttgctactggttaacataatcagcagtttgaacagaagaatgtaaagcaacacctgcggctgcggccgtggcggtaacagcaataatgcccatgattattgctataagagtaaaaataaatctctttgttctgtttaacattccctttagaatttcagttactatgtgtatagaaggagaggcttcccaaggtctattaagggaaacaggtatcccaactccctctcgggctctgacaagcaagatactgttattcttatcaattgtagaatcaatgcaagtgaaaagacaacagtcaagacatgatagagtttgagaatcaggtagaatattgatttgtcctactactaacataaaaggaggtttaacacaaccctgtaatggggttgtccgattggaggtcaaagctacaatatattgaagttttttactatgggtttattttttttttaatttatttacttatttttgagagagtctcgctctgtcgcccaggctggagtgcagtggcgtgatctcagctcactgcaagctccacctcccgggttcacgccattctcctgcctcagcctcccgagtagctgggactacaggcacctgccaccatgcccggctaatttttttttttttttgtatatttagaagagatggggtttcaccgtgtcagccaggatggtctcgatctcctgacctcgtgatccgcccgccttggcctcccaaagtgctgggattacaggcgtgagccactgcgcctggccgggtttatgttttatattctcctttccaaatctgtacggggtttggaccatcattaatttccacagttctgggtgttctgggcttactgttggatcaatcattttagggcgtggaggagccatactgctgccttcccagaagataggaaagtcgccttttattctgtacttttgggtaggtgcctcttcggaatagtcaactgggaagccgcgctcttgacatcccttgggccgtccagtacaatttactgcaaatcgccccttaggggtccagtcaatgacgattccataggagttattttccatcaccacggcactatttgcaatgcaatcttcccaggccagctcctcagcttccttagaccatactgtcaattgttctgggcattttttctttcttggtctaaattgattagtaagaatattagctacacgataggaatttcctgaggatatgactttagttttagattgaaagctccttccactaactatatgaatagaggcctctgacccattatgcgcagggacataaaccatccagctttgtttgtcataatctaaacatcctgctgcaggccccagacatacaggaggagagcgataaccaatggatgcatttattaacattccttcctcctctggatgaatagggccttggttatcagttggtccaggtgtccaaacactatcattaacgtaaacctcaaccgggggttccaaccaagtgacaggcctaattaaaggcgggaatgggccatatgcccaacaggtataattttgtgctgctgtagccccatggagacttaccaccatagcaattactgcaattatagccaccatcatgagtgaatcccaacttctcccccttttttgttttctgtgttagggttttttggttgcagggcgtagatatatgcagccacaggtttgtcaggcgaggaggtcactgctcttattccagctttgcatcccaggattagtaaataacagaagacaaacctgagtataattagcaacatttttttttccagtcaaagagtgacctgtagtgttacttggcatcttagtttactatacagtattaatgaggaaccccactgggggtatgttaatttattttagctaagcagttatgttattagaagctgaggggtggggggttgttaaagtaacagggaagaagaaaggcggatttaagatatgagcttaatagagtgtagtaggtataggtagtaggcaaagtgagagaattaaaaatgaatgaattatttggcttagtcttcgcttcttcagcacaatgtctggggcctatgttgtttgcggaagccgcatttttgaggctacagttcctgtaggatctttcttaggctggctcgaattttttcttctttccgtcatttgatgaggacgtagtcttcaggctggtactggaaattctaggagtggtgcctgtgctgagagactttttaccatctttaaagagcaggttagtgttttaagaaaaacttgtgctttattttaatgtttagtttatagaaaaactggatgatacctttttaactttagcaaatgtttacacacaattttttacaattatcattttaaaacttgcttagaccttcaaaacaaaaattatacaacctttcttgcacaaattcctttttataacatttttcatgactttcacagacaatcttcaacatgccttaactttcttcttttttttttttttctttttgagacggagtcttgctctgtcacccagaccggagtgcagtggcaagaactcggctcactgcaaactccgcctcccgggttcacgccattctcctgcctcagcctcccgagtagctgggactgcaagcgccagccaccacgcccagctaattttgtgtagttttagtagagacggggtttcaccatgttagccaggatggtctcgatctcctgaccttgtgatccgcctatctcggcctcccaaagtgctgggactacaggcgtgagccaccacacccagccaacatgccttaactttgtatgttttataactttccttactaaaggtacatttttataactttcttaatatttcctttcccttcttcctacttcatttctttccttagtctttctttttgcatctttttctgatttctgtctcttctagtctctctcttatttttttctatttctctttctaatgtacaataattagatgagtgttggtaacaatggatatatgtacatatcttagtttccaaaatttagggatgtgtttaacatctgtttgccacaactgattaggttccaatcctctagggttaacacctgtttaaggaggaaacgtgcctgtcagctggtaatctgggcattgtaggataatttgtttagccagtctctgggctagttgaaattgtttagataagtttctccaattttggtggaaaaattgatgtgattgggtggcttggtcaagcagtgatgtcataacctgaaggtctgcttgatcttgccacaagccaatgggccaggcagagatctgtgggctcaaacgtgtgtaataaaaataggatgtgtaccttggtccggcaattgctgaagttgaagaaaaagaggcacacagagtgggctccagagcgaacttaaggctgtaaaagtaatttaataaataaacagaacagcctcagctctccgaatgctagtaaatttagatccagtgattggattacgtggtctccaccagactgccgcttttccatctttaccagacccattagtaaaaccagtcacagctcccgccgggcgcggtggctcatgcaggtaatcccagcactttgggaggccgaggcgggcggataacgaggtcaggagattgagaacacggtgaaaccccgtctctactaaaaatacaaaaaaattagcagggcgtggtggcaggcgcctgtagtcccagctactggggaggctgaggcaggagaatggcgtgaaccgggaaggcggagcttgcagtgagccgagatagcgccactgcactccagtctgggcgacacagcgagactccgtttcaaaaaacaaaaacaaaacaaaaaaaccagtcacagctccttccaaaggggcatcacgagtaattttcggaggaacccatgtagttaattttaagaactggaaagttttatttttaggataatgattatcaatacatccaacaaattctgctaaataaacttgccatgtaactgaattaataaatgcctgtttaacctgatttttatttataggaactataatcttattaggttcagtgccacaaagtttaacaactcgcatacgagcctgtccaattaaaattgccatctgatctaaatatactgtaagtgtttttatggtattacgtggcaaaaaggactattcaactaaatcattattttgaacaataatccccgttggggagtgtgaagtagggaaaacaatgaattgtaaaggcaagtctgggtcaatcctactgacctgggcttgcggaattttttcttcaattactcttaactctttcatggcctcgggtgttagttctcttttactgtgtaaactggagtctcccctcagtattgagaagagattagacatagcataagtaggaattcctaaggtgggccgaatccaattaatatcgcctaacaatttttgaaaatcatttaaggtttatttggtttttgtttttgtttttgagacggaatcttgctctgtcccccaggctggagggcagtggcttgatctcggctcactgcaagctccgcctcccgggttcacgccattctcccgcctcagcctcccgagtagctgggactacaggcgcgcagccaccacgcccggctaattttttgtatttttagtagaggcggggtttcactgtgttagccaggatggtctcgatctcctgaccttgtgatccgcccgcctcagcctcccaaagtgctgggattacaggcgtgagccactgcccccccgcccatttaaggtttttaaagaagcttttctaatttgaaccttttgaggcttaatgctctatcctgtacttgcattcccaaatactgaaaaggagtggttgtttgaattttgtcagatgctttaagcaatccagcgtttgtaattgccttttgcaaagatgaataacattgaataagttggcctctattttttgctgcacacatctggaaattgatctctaacaggctggatagttctgcctacaaaagtctgacaaattgtgagactgtttaacataccccgaggtaaaaccttccaatgatatctggctgcaggttctttattattaactgcagggatggtaaagccaaatttttcgaaatctgcctctgctaaaggaattgtaaaaaaaaaaaaaaaaaaaaaaaaaaaaaaaaagcaatcttttaaatctataataacaagcggccagtctttagggattataatgggggatgggagccctggttgtaaagctcccatcggttgaattacagcgttgaccgctagtaaatcggtcggcatgcgccatctgccggactttttcttaattacaaatactggggaattccaaggagaaaaagtgggtgtgaaacatgtcctttttctagtaattctttaactatttcataaagcgcccccaatttttccttagggatcggccactgttcgacccagacagggcgctgggtcatccatttttaagggaaattgctccttccccgtaatgaacggcagggcgagcctgaattttaattaactggtggctgagcctgaatcatccctttaccgtaattaacggcaggttttgcaacaatgggcgcggcgaaccgcgtctcaggcttccatgcccgcaattcacaaggcttaggcgcgggtggccattccggagcttcccctgagggtgcggtaggttggacggtctctttcatatgtgtttggttagcatatataacctcctgattctccgccttttttaaactggagctagatggtgcactctcctgaccgtcaaactcgtctccttcatttccaaatgctggttcctcctcagtctgcaaaggctcacgtgctgttttcactgccgcccacacagaccaagcggagaaaggaatttcttgaccctctttttgtgcctgtttgaagtcagcccttattttttcccagtctttcaaatccatggagctgtgttccgggaaccaaggagaatattgttctattagctgaaacagggacagaagattttgggtgctcacgtttaaccacagtggcacaataactgccgcaccaaactcaaataattattatgtctactctcagcctgacccacaatttcctgttgttaccctggaattctccgagcgccccgcttacctgcagagcttaaaagtcttttcgttggccggcgcggtggctcacgcctgtaatcccagcactttgggaggccgaggcgggcggatcacgaggtcaggagatcaagaccatcatagctaacatggtgaaaccccgtctctactaaaaatacaaaaagttagccgggcgtggaggcgggcgcctgtagtcccagctacttgggagctgaggcaggagaagggcgtgaacccgggaggcggagcttgcagtgagccgacatcgagccactgcactccagcctgggtgacagagcgagactccgtctcaaaaataaataaataaataaataagtaaaaattaaaaaaaaacttttcgtccttgggagttctccatctgtcggtccttcattttcgacgctcctgcattccttcacccggttgttttggagataccacgttgggcgccagatggtggggtccagcctcaacactacccgtgggtacctgaagtccggtggcgacaaaggaatgagaaaagacaagttaagattttaaagcaggcccagggggccagttgctagagtgaaggctgcaaaacgcccagagttctggttgcctgacgatttattgagcacaatcttttgatctaagaagcagctgggatgaaacggtgaaggagcgggagcgtacgtcattggaaagatgtagagcagtggcggttatatgaatttcctttaagctaaaagcatatgtctaactgctaagacagtctttaacttatcgggctgcagctggtgggggccggttttacaaggagctaggatgtctggtcacgttccaacacttcaagggagtgtgtcagcccagagcattctgtgtaaagccgcagagcaggtcatgccctctggcctgggaacttaatggcttgcggagatgattctcctaagggccccctacagttttccataggtgtcctacacaggggtgactgactaaactggcaccccataaacctttccaccagcacttttgtttcaggctgctggctctggtgagctcttcttttttgttttgttttatttatttatttatttatttatttactttattttttttgagacacagtctcgctgtctcccaggctggagtgcagtggcgtgatctcagctcactgcaagctccacctcccaggttcaggccattctcctgcctcagcctccggaacagctgggactacaggtgcccaccagcacgcccagctaattttttgtatttttagtagagacggggtttcaccatgttagccaggatggtcttgatctcctgacctcgtgatccacccgcctcagcctcccaaagtgctgggattacaggtgtgagccaccgcgcctggcctcatttatttgttttttagatggagtctcactctgtcacccaggctggagtgcagtggcacaatctcagctcactgcatcctccacctcccaggttcaagggattctcgtgcctcagcctccctggtagctgggattataggtgtgtgtcaccatgcccggctagttttgtatttaaaaataggcaggattaaaaagtaggtggggttgatccaaccattatctacatgattgaaccccaccttcagccccttccccttcctggaggtcaggtggctaaaaatcccaaccttggtggttggtgtttctggcatgaccagcccccatcctgagtcacctccttggtataagctcagttatggtccagggcccccatgaataataaagacgcttcttttttttttttatttccataggtttgggggaacatgtatttggttacatgattaaattccttagtggtgattcatgagagtttggtgcacccatctcccaagcagtatacactgcacctaatttgtagtattctatccgtcagctttccaccctttccccttgagcccccaaaatccactgtgtcattcttatgcctttgcatcctcatagcttagctcccacttatgagtgagagtatacaatgtttggttttccattcctgagttccttcacttagaataatggtctccagtcccatccaggttgctgcaaatcccattaattcattccgtttcatggctgagtagtattccattttatatgtatgccacagtttcttcacccattcgttgactgatggaaatttaggtttgttccacgtttttgcacttgcgaattgtgctgctataaacatgtgtgaacaagtatcttttttgtatcatgacttcttttcctctggatagatacccagtagtgggattgctggctcaaatggtagttttacttttagttctttaaggaatctccacgctgttttccatagtggttgtactagtttacattcccaccagcagtgtaaaagtgttccctgtttgccacatccacaccaacatctattattttttgagtctttgattatggccattcttgcaggagtaaggtggtatcacattgtggttttgatttgcatctccctgatcattagtgatgttgagcatttttccatatgtttgttggccattaagacacttctattacttggaaaattccaagagtttagacgccccctgccaggaaccagaggtagtgactagacagattatttagcacacaatatctttctatcttaaaatcgcaatcatatctgcaaagtctctttttgccatataaggtgacattcataggatccagggattaggacttggatatcttttttttttttttttttgagaaggagtttcactcttgttgcccaggttggagtgcaatggcatgatctcaactcactgcaacctccacctcccaggttcaagtgattctcctgtctcagcctcctgagtagctgggattacagacatgcaccaccacacctggctaactttgtatttttagtagagacagagtttcaccatcttggtcaggccggtctcgaactcccgacctcaggtgatccgcccgcctcagcctcccaaactgctgggattacacatgtgagccaccatgcctggccaggacttggatatctttgcaggccatcatgcatcctagctcaaagagtaactagctgagaaagactcccaggtgggggatggaagtcgaaatgcgtacctggtggcctaactgcttgctgagctgggttaagtggcaatttggaagatccacagacagatctagtctaacttactgatgatcaagtggagatctctgactcactgaacagcaacagagacgaactgacaggattgacttccaggctgactgacaacctcaacggcagagcctcttccaggttgtagtgacaaatgtacaatggaagcacaggtggacaggagaagcccaggagtctcttcctgggggtggagctgagtaagtaccggctgtggctggggcagaaggaagaggcccccaggttaagctggaacttccccaggatcctgtccatggctcacgcatgccctcgagcccctggtactccaggcttagatgctggggcagcagggctggagggaacctcagggcaggagcccagagagccaaataactggattcaaagggtccatcctcccttcaccattggcctcaggcatacctgatcaatgcacaggtcccagcttgcagtctcctggctctaactggctggtgttagagcagatccataaagaccccaaataagagagtcaggaccaaattgtcctccctggcccttggccccagcccacccccctgccccactccccaacacacaagagtcaaccttccagggaagaaaggaatccctggagcctatccctcatcctagaacagatattcagtcagcttttatggtcctggaatattggtcttgctagaaagactattctaaatgccaacagctggccgagtgtgatggctcatgcctgtaatcccaacactttggaaagctaaagtcagtggatcacttgagcccaggggctcaagctcagcctgggcaacatagtgagaccctgtcactataaaaatagttttttttgaggtggagtctcgctctgtcgcccaggctggagtgcaatggcgtgatctcggcttactgcaacctctgcctcctgggttcaagcgattctcctgcctcagcctcttgagtagctgggattacaggcacaccccaccacacctggctaatttttgtatttttagtagagacagggtttcaccatgttggtcaggctggtttcgaactcctgacctcaggtgatccacctgtctcagcctcccaaagtgctgggattacaggcatgagccactgtgccaggcctgttaaatgacttttctaaactacttctgtaaagtctatattctctgtcatggctactgaagtctttgctcagttagcttcatggttagctagtggttggacagagatttccttgaatgtctggaatcggaagtctgccagtctttgccagggagctctgtgtacttattagggacacaccttcaacattcacccaggaaatttacaactgtgctttagctctcacttcctgcttacacagagcctcgaagtcggccagcggtgtgagcttagggctgtctcaggtctttcctaagcatgtggccttccatatccccagaaatatgtcagaatttttcaaaagtccctccgaacatctaatgtcttcatttttccttctaagattttttttttttttttttttgagacggagtctcgctctgtggctcaggctggagtgcagtggcgcgatctcggctcactgccagctccgcctcctgggttcacaccattctcctggcttggactacaggcgcccgccaccacacccggctaattttttgtattttcagtagagacggggtttcaccgtgttagccaggatggtctcgatctcctgacctcaagtgatcctcccgcctcgacctcccaaagtgctgggattacaggcgtgaaccaccgcgcctggcgcttttccttctaagatttttagttaggctattatttccccaactgttaagtattgccacaggcagctgcaatgttaaaacatttaacaaatagcccctggggagaaatgtttagcatccggcaagttcaagtgaggtcaggtctttcagagcagggtcttccagagtaccaataaataggtcaataaatgactcttcttggctgggtgcggcggctcacgcttgtaatcccggcactttgggaggccgaggtgggtggatcacttgaggtaagcagtttgagactagcctggtcaacatggtgaaaccctgtccctgctgaaaacacaaaaatgagtcaggcatggtggcgggcacctgtaatcgcagctactccggaggctgaggcaggagaatcgcttgaacccaggagaaggaggttgcagtgagccgagatcacgccactgcactccagcctgggcgacagagcgagactctgtctcaaacacacacacacacacacacacacacacacacacacacacacacacacacctcttcttgaatgatcctgaatgaggttttgaaggagccgcacctctgttcttttccgtatggtatcaagattgtgggctgttatttttcaaggctaccctctgagctggagagccaggaataagactagagtgagttaaaattctacagagcttgctgtttttttatgtgtttttttttttaattaaatgctctgcaaattactgtaagcttttggttaatttccagagttgtgaaaatgttgattctgtcaaattttgccagtttttttcattgcttttgtagaaaggcaaattttactctgccattttgctgacgttcttttttttccccttcgatgcttaaattatctttaatttggccagtgaaagcttttctctctggcttctgggtccttttgacatattcctattggttttttgctgatcgttttttcttccttcctggcctaactagatgttctaggcttttgtcccccccaaccctgcctcagcctcccaagtaactaggactacaggagcacgccaccacgcctggctaatttttaaattttttgtagaaatgggtcttgctatgttgcccaggctgctctcatttttccaaaaagccctgggctaggtggagattggcagttagaaatgatctgggtgttaagtgtgcccattgttactggggtatgtggctcccaggtcctcttagtagataaatgggaacacacacacacacacacacacacacacacacacacaaacttatttctatatttatctttatattttgaaaaccatgaattcacctcagtacctccaattcaatagggtttattcttgtttttttttgtatcttttcttttttttttttcttgagaccgagtctcgctttgtcacctgggctggagtgcagtggcgcaatctttggcagtctcagctcactgcagcctcaacctgctgggcttgagggattctcctgcctcaggctcctgagcagctgggaccacaggctcacggcaccacacccagctaattttttgtctgtaaagacagggtctcactatgtttcctgggctggtctggaactcctggactcaagcgatcctcccaccttggcctcccaacgtgctgggattacagtggccgggtgcagcggctcacgcctgtaatcccagcacattgggaggccgaggcaggtggatcacccgaggtcaggagttcgagaccagcctggccaacatggcaaaatcccatctctactaaaaatacaaaaattagccgggcttggtggcgggagcccgtaatcccagctacttgggagcctgaggcagcagaatcgcttgaacctgggaggtggagtttgcagtgagccgagatcttgccactgcacccagcctgggtgacagagcaagactctgtctcaaaacaaaacaaacagaaaaacaaagtgctgggatcacaggcataagccaccacacctggcctctgcatctcatgagcatttattttgtgctatgtgttttttggatatgacctcaaagaatccggtaacacagccgccctcattctcattttacctatgagcatagtggctcagagatgagtcacctgcccacagcccatcagctgataaacactggagttgggtttgaaactgtgaaagcaatgaggaccacatcattttcacttcccttcgtggccccaactcaaaccaacccaaaacccaagaaagaagatgtggagattgtgttgcctttcataactgggaagcgcgggtgagtggaggggaccagattcaggatctgcttttctttctttctttttttttttttttttttttgagacggagtcttgctctatcgcccagtggagtgcagtagcgcgatctcggctcactgcaacctccacctcccgggttcacaccattctcctgcctcagcctcccgagtagctggggctacaggtgcctgccaccacgcccggctgattttagcatctgcctttctttatctgtctatgatctgtttgctccagaatgtaaccttctagaccaaaggttggcaaacatttgaaaagggccaaatagtaaatatttttgggcctcgagggctctctgctgcaactctgctattctagcacaaatgcgtcacatacaatacataaatgcatgggcagaaaacaatttgttagccgggcacagtggctcacgtctgtaatcccagcactttgggaggccaaaacagattagggttttccaaggctgcaggaaggcaggaatgtggagtgactgcttagtaagtatggggggctgggcatggtggctcacgtctgtaatcccagtaccttgggaggccaggggaggaagattacttgaggccaggagtctgagaccagcctaggcaacatagcaaggccccatctctacaaaacatttgaaaattagctgaccacggtggcacatgcccacgtccccagctactcaggaggcagaggtgggaagattgcttgagcccaggaggctgaggctgcactcaaccatgattgtgccactgcagtcaccctgggtgacagaagaagaccctctctcaacaaaaacaaaaataaataaataggccgggcgcagtggctcatgcctgtaatcccagcactttgggaggccgaggcgggtggatcatgaggtcaggagatcaagaccttcctggctaacacggtgaaaccccgtctctaccaaaaatacaaaaaattagccaggcatggtggcaggcacctgtagtcccagctactcaggaggctgaggcaggagaatggcatgaacccgggaggcggagcttgcagtgagccgagattgcaccactgccctccagcctgggcgacagagtgagactccgtctcaaaataaataaataaataaataaataaataaataaataaataaataactatggggtgtccttttggggagatgagaatgttctggaactaggtagtagggatggttgcacaacattgtaaatgtactaaatgtcactgaattgtatactttaaatggtatgctttaaatggtaaagtttatgttatgtgtattttactacaatagaggaaatgaagggaatccttcaggatgaaatgaaagaacactagacagtaactcaaatccatatgaaaggccaggcgtgatgactcttgcctgtaatcccagcactttgagaggccaaggcccacctgaggtcaggagcttgagaccagcctggctaaacatgatgaaaccccgtctctaccaaaaaatacaaaattagctgggtgtggtgtcgtgtgcctgtagtcccagctacttgggaggctgaggtaggagaatcacttgaaccccgttgacgtgagctgagatcacaccactgccctccagtctgggcgacaaagtgagaccctgtctcaaaaaaaaaaaaagtccacatgaagaaataaagaaccccttcccaccactggcattttccgcaactgcctcccatataaattcctcttgtcctcaaatttgggtctgcttagtgtactgattaagcatggacttgtgtcaacttgcctaggttcgaatcccagccctaccacttacaagctgtatgaccatggtcaattgttaacctctctgtgtctcaattttctcctctgtaaagcaggataataactgtgcttttcttgtagtgttattgtgaagactgttagtgtctccctcacccacccagtcaaaaaacaccagaatcacacatgtggttgaacaaatgtctttgcctcccctcccctcccctcccatcctctcccctcccctctcttttcctttttctttgagacggagtctcgctctgttgcccaggctggagtgcagtggtgcaatccggctcactgcaacctccacctgccaggttcaagcaattctcctgcctcagcctcctgagtagctgggactacagatgcgtgccaccatgcccggctagtttttgtatttttagtaaaaacagcgtttcaccatgttggccaggctggtcttgaactcctgacctcaagtgatatgcctgcctcggcctcccaaagtgctggaattacaggcatgagccaccatgcccagccagttgaaaaaatttcaatgtattacttgtcacagcgaaggagaatacacaccacgggtagctgttactgaaacaccagttcagtcggctgcttgccacacagaaagccaatcactgagacactagtattgcccatgaagaaggctttaattaggtgccaaccaaggagatgggagatcagtctcagatctatctccctgactgattgaaattaggagtttaggctggacgtggtgacttacgcctgtaatcccagcactttgagaggccgaggcaggcggatcacctgaggtcgggagttcgagaccagcctgaccaacatggagaaaccccatctctactaagaatacaaaattagcctaggggtggtggcacatgcctgtaatcccaactactcaggaggctgaggcaggagaattgcttgaacctgggaggcagaggttgcgatgagctgatgtcgtgccattacactccagcctgggcaacaagagcgaaactccatctcaaaaataaattagttaattaaaaattaggggtttatatagcagggaagaaatgtgacaatatgtgagaaaacaacagttaggtaggggtaaggaagagaagttggtcaacaggaagcagatcgtcaattgggcaatcatgatgggtgaggggtctgacatctcattgtccaggtgtgatctgctaagtttcagctccttgatactatctgggagtcctgatggttcgtttcctgggaaaggaactcagataagacaaatgtaactttctcaagtcaattctatgtttattgaaagaaactattaatataagttctatgggatgatggggctagtttcataaccatggggtatctcagtaggagagtgtaataaatgacttattatatgattggggcttgtgttaagttctttaggggaggattctaggttggatgctatcaggaagagggggtaatcttatgactaggcattctaataagtcttttaatttaattttttttttgagacagagtcttgctctcttgccgaggatggagttcagtgaggcaatctcagctcatggcaacctcctccccccaagtagctgggattacaggctcctgccaccacggccaggtaattttttgtatttttgtagagacagggtttcaccatgttggccaggctggtctcaaactcctgaccttaagtgatccacccacctcggccttctgaagtgctgggattacacgcatgagccactgaagaacaaataaatcttatatgcaaggagtaaagactagactgaggctaaagccatgattgataaaagagagtgctatgagctgagtgtttacctctgaaattcatatgttgaaatcctaacccctaagatgatgttattaggaggtggtaatttggggttagtaattaggtcatgaggtcagagccttcattagtgtcctcataaaagaaaccctagaaagcttccttcaccctttccaccatgtgagaacacagcaagaaggcaccatctatgaatcaggaagcaggctctcaccagccaccaaatgtaccagcaccttgatagctggaagtgctgggcaaagttctagcaatgctatgatcagctgcaggaccagaccagctcctagaacaccatggtcacctaggaaggccagggcagctcctaacaacaccaaagccagctgtgagcttcaggcctgctcttgaccactcttcttctctcgggattaaactagctatgttatgtagagcatgtagaacaatgtctgataaatcttttatcgagacttgctctttctagcctccagaagtgtgagcaataaatttctactgtttataatccacccagcctatgatgttttattagagcagccccaacagactaagagagaaaggttgttccaattagccagaatataggaatgtttggttatgtctggtttggacagtgctcacattttgtctgtgttcagacatgcttacagagtgatctcacttttgtcttgctatgtacacatttacagctacaaacgtttttgcttgatgttgatgttctgtgaaattgtttatattcaagaggacaacatcataacctaggtggaagtgctgggtaaagttctagccatgccatgatcagctggaagaccagaccagctcctagaacactctggccacctaggaagcccagggcagctcctagcaacaccaaagccagctgtgagcttcaggcctgctcttgaccactcttctcctctcaggattaaactagctatgttatgtagagcatgtagaacaatgtctgataaatcttttttcgagatggagtctcactcactctatcacccaggctgtttgctcactgcaacctctgactcctgggttcaagcaattctcctgcctcagcctccccagtagctgagattacaggcatgcatcaccatgcccagatagtttttgtattttttatttttttaatgttttagcaaactttgttgtacagaacaaaaaaaaatacatcatgattctgcatgattttctctcccacaaaagcatgggtgaaaaccagtaacttacttataaaaatattttatttaggactctaataagataatatgtacattcataccttgtctcctgagtatttaaatggggaaaggttcacctgaaaaaagttttccccaggaaacccatagtttcttggctcaactgacccattaaaaaagtccacctagagccaggtgcggtggctcacacctgtaatcccagcactttgggaggccaaggcgggcagatcacgaggtcaagagattaagaccatcctggccaacatggtgaaaccccgtctctactaaaaatacaaaaattagctgggcgtggtggcataaacctgtagccccagctaatcaggaggctgaggcagaagaatcgcttgaacccaggaagtggagattgtagtgagccaaaatcatgccactgcactccagcctggtggcagagcaagactgtctcaaaaaaaaaaaaaaaaaaaaaaaaaaaaaaagtccacctaggcggggctcagtggctcatgcctgtaatcccaacactttggaaggccaaggcaggtggatcacctgaggtcaggagttcaagaccagcctggccaacatggtgaaaccccatttctactaaaaatgcaacatttagccaggcatggtggcacacacctgtaatcccagctactcaggaggcagagacaggagaattgcttgaacccggaggcagaggttgcagtgagccgagatcaaaccattgcacttcagcctgggcgacaagagcaaaactctgtctcaaaaaaaaaaaaaaaaaaaaaaaaaaaaatccacctgtatcaactttctgccagtctggagaagatttgttttctttgatctgacatcatgtgttcacaagcttccaaaatgtttgccaaaattaaagtttgatggatggtttttgttttgacccatattcttccattcattccaaatactatctccagggaataaagttttcccacttcctgtatgattccacaacctggagttaatagctttctaactaagcccaaagtcactttaaaaagcagaccatcagggccaggcacggtggctcacgcctgtaatcccagcactttgggaggcagaggcacgcagatcatctgaggtcgggagttcgagaccagcctgaccaacatggagaaaccccgtctctactaaaaatacaaaattagctgggtgcagtggcgcatgcctgtaatcccagttactcaggaggctgaggcaagataattgcttgaatctgggaggcggaggttgcggtgagccaagatcacaccattgcactccagcctgggcaacaagagcaaaacttcatctcaaaaaaaaaaaaaaaaaaaagcagaccatcctgtccaatgacacccattccattggctcgtcctcagctgtcaatacacaccatctctagttccatgtctttattagcaaccacaaagtggccatagatgagatctccaacctacacatatggtctgtttcttttagttgcaccttcaaacgccaagtaaaacaaagaagctggctcactccctccaacatcagctctgaatgtatctccagatttagctgtcactatgccaatcacatggtctcctttcactcgaacatactcattcccggggctgcagcacttccaacccggcggtgtctcagctttcccagtcctcgttcttgtgttttttagtagagacagggtttcaccattttggccagtctggtctcgaactcctgacttcaagtggtctgcccacctcagcctcccaaagtgctgggattacaggcatgagccaccgggcccagcgtgataaatcttaagtgctgtaattactgagtatccatcattcaaataggcaatttatacctattactagtgcactgtattaaaactcatagtaacatggccaggcatggtggctcacacctgtaatcccagcactgtgggaggccaaaacaggtggacccacctgaggtcaggagttcaaggccatcctggtcaacatggtgagaccccgtctctactaaaaatacaagaattagccaggcatagtggtgcgtgcctttaatcccagctactctggaggctgaggcaggagaatcacttgaacccgagaggcagatgttgccgtgagctgagatcacaccactgcactccagcctgggagacagagcgagactccatctcaataaataaacaaataataaaaaataaataaaactcacaataacagtgtgaggcagtgtagttgtctcatttcacagctgaggaaactgagactcccaaaaagtgaggctcaaggtgtcagcgttgtatatgggttcagatagagtcttttggcactggaatttactggatagtttctgcctgccctctaaatgactctcctctgtgtcaggtgcttcatctctcaccccacttttcaggaagggtgtgtctccatcctgttccttattcttcttcctggcttggagagatgtgattctgaggggctgcaatgcatggggttataaaaacccacagtccagagaggggatggagagagaagggagtagagaggagaagatggaggaagtgtgcgagcccaaggggccaggcaaccctggtgaggctgccccaccccttccgtgggatgttggtagtgaaacagaaaaggttcccttgtcccccttgcagggcgtgtgacggggggtgtggctcacatcttctgtgccccgctgctcaaacctccaggggaagcatgcagacaggcaggttgtggggctccaaccccatggcagcgtctaggggtgaatgctttacagctcatgagggccccgtgggaatgtgttacagcgtgctctttcagttttgccgtccgcaattggctgatgttcatcagctcagttagatgctctgccttattgcaaggacagacgactttctctctcccagggttcttgccttagtgaactggaaaaattggatcccatgtgatccaattgggtgatccgattggagggtgggtgaaagtttttttatggagtggtggtagccctcagtgaggtgcttttctgtttcactgtcaacatcccacagaaggggtggggcagcctcaccagggttgcctggccccttgggctcacacacttcctccatcttctgaacccatatacaacgctgggagtggtggctgtagtcccagctacttgggaggctgaggtgggaggatcacttgagcccaagagtttgaggctgcagtgagctatgatcacaccactgcactccagcctgggtgacaaagtgagacctcggtctctacaaaaggaaagaaataaaagaaaaagggctgtctagcaaagacatggaatcaacccatcaatgatagactggataaagaaaatgtggtacatatatacaatggagtactatgcagccataaaaaagaacaagatcatgtcctttgcagggacatggataaagctggaggccattatccttagcaaactgatgcaggaacagaaaaccaaataccgcatgttctcacttataagtgggagttaaatgatgagaacacatggacacataacggggaacaacacacactggggcctattgcagggtggagagtgaggagggagaggatcaggaaaagtaactaataatctgtacatgtcatatgttcacctgtataacaaatctgcacatcccacacatatacccctgaacttaaagtttaaaaaaaatcacatcattactctttaaaaaaaaaaaaagaaagaaagaaagaaaaagaaaaagggttgtcacttctgccttcatctgctccctctaaccctctgatggctgccccacctgccaccactttcctgaaatgaccaaggagagtaactaccgttcctttgtgaaagccaaccagacttgtttctatcttgtttccactcattaatggggtggccactccctccctcctccttgaaactcctctctcccaagacttccctgatggcctcacctcctggttctcctcctgtctgcctgaccgctccttctccatctccttcatgggctcctcttctgcctgccctcaaaatgtccctgtcatttacaagtctttactatccaaattcactcctgctactgggaaggcaagaaggaaagacagtcacagctggactgtctttcaagtttctccagagctggagccagtgaggttacactgggtagcaaagtcagaggaaggagccaaggcaggaactaagtgagaaaccaaccaagttccaatcagccaagagtgaaagtccaaactggttgtagaaactaaatggccatggctgggtgcagcggctcatgcctgtaatcccagcactttgggaggccaaggcgagtggatctcttgagtttaggagtttgagaccagcctggggaacatggtgaaacctcatctctactaaaaatacaaaaattagctaggcatggtggtgcatgcctgtagttccagctactcaggaggctgaggtggaaggatggcttgagcctgggaggtggaggttgcagcaagctaagattgtgccactgtactccagcctgtgtgacaccatgaggccctgtctcaaaaaaaaaagaaaaaagaaagaaactaaatggccacaaggtagggtatggagacaaccagggtgagcccataaaactatctgggcctggtgcctttcttcttattagatctctaattaccttcttttcagctgttttcaaattgccaaagcatccacaaagttgccagatctagtcagcctgcaagctgaccacagatgggctcctataatatctaatctgttcaggtttcctatttcagatgatttgtatcactctgtgattaatttccaaattattactatgtttgtttcaactccgcctccccccaccccacacctaatagttattgattgccacaaacaaattgccacaaatggcccagcttaaacaacatacatttattattttatagtttttatgggtcaggaatctgggcatgacttgcctggatcctttgcctggggtctctcataagacggcaatcaaggagatggccaggattaaggtttcatctgaaggctcaactggggaaggattcacttcctagctcactcatgtgactgttggcagaatcagttccttttgtgctgttgggcaaattatctcagttcctagctggctgttggccagaggacaccctcagcttattgccacatgggtttctccaacatagcaacttgcttcatcaaagccatcaaggggaaaagtctgctagcaagatagaagtcagaatattttggaatataatctcagaagtgacagtttctcaatgatgaagtattctattggttagaagcaagataatcaccagtagaggatcacagaaggccatgaatactaggaggtggggaccatttcagaagctacttactacaccccaccagcatataaatatataagtctattagagcaggaacactttggttcatgttaaccatcacttctccagtgttttaatgagtgaatggaggctgggcatagtggctcacacctgtaatcccagcactttgggaggctgaggcaggtggatcacctgaggtcaggagttcaagaccagcctgggcaacatggtgaaaccctgtctctattaaaaatacaaaaattagccagacatggtggcgtgcacctgtaatcccagctactcaggaggctgagacacaagaatcacttgaacctaggaggcagaggttgcagtgagctgagatcatgccattacactccagcctgtgtgacagagtgagactctgtctcaaaaaacaaactgaaaaaagagtgaatggcatatagtaggtgataaattaatattggtgaaatgaaagattcaatggggtaagctatgtggtcttagagtggaatagctagagattgcttcaattcaacaattttttattacgttcaggaattctattcacagaatagtcaaggagcagtggatgggtgtaattgtcatgacaggtaaaaccaggggtgataaactgtggggtgaacacagacatagaagagtcactggataaatctgctggcttgcatcactgtgtaggggtcctggatgtggtcggccaatattaggcttagtgagtatgcttgtaggcatacacctacaaggatgtatcagttcgctattgctgcataacaaaatgctcccaaaattaatggcttgggctaataatttatttggtacatgattgtgtggttcaccaatttgggtcagattcagctggaaagttcttctgggtatagctgggctcatttatgcatctgtggtcagctgatggattggctaaatctggctactcttgaatgctttggcaacttgaaaatgtagctgaaaatactttaacaaagctcttcttgagaggcaaactcactatcccctccccttgaatctgagcaggcttggattgcttcaaccaatagagtagagcagaagtgatattatataacctccaaggctagatcataacacatcatgcaagcttctgtcttgtttgcaggaagattcacttccagagccttgagacaacatgtaaaaagttcaactaccctgagactgcagtgatggagatgtcatgtggagagaccacatggaaagtccctgaagctacaggaggagagcgagagagagagagaaagagatcgatcccccaagagacttcaatcatttgagtcatcccagcccaggaaccagacatgtgaatgaagaagctaccagataatcccagccaccagataccagctcccagccactggaggcactcccccactcttcaagtctccccaccttaagccctagatgtcatggatcagagacaaaccatccccactatgccctgtccaaacttcagacccacaaaaaccatgagcatattaaaaatgattgctgttttatgccactgagttctcggatggtttcttacacagcaatcgaaaactggaacacggctgggtgcagtggctcatgactgtaatcccggcactttgggaggctgagacaggtggatcacctgaggtcaggagttcaagaccagcctggccaacatggtgaaaccccatctctactaaaaaaaatacaaaaaattagccaggcgtggtggcgtgagcctgtaatcccagctacttgggaggctgaggcagcagaattgcttgaacccgggaggcagagatggcattgagccaagaccacaccattgcactctagcctgggcaatgagacagaagctgcatctcaaaaaaaaaaaagaaagaaagaaagaaaaaagaaaagaagaaaggaaactggaacagataacctcactcacagctggaggttggtcggctgacagtttaggccatgagggtgactgagccatgtgcctctcacctttcaggctacctctggcttgttcacatgatggttaagagtggcaagatcagtgcaaaatgacaaagtagacagttccaagcccgcgttccccacagaaacatcaaaaaacaagcagaaactgtcagatacaactttgtcagaactctgggaaacagtcaaaggtttacggtagtccagtgaatgctgaatcaagaagaaagacaacttcaaaatgatcaaaagcttttgatatttcgacttgcgtttgccccacttgccactgccctcccttgtgtgacagcagtagtgggaagagggaagcccacactcccagcatgagactctcattcctccttccagagggagcagagcagactttatttgtagatgatagtgtatgtccgctctaagctgtctgggagccacctgaaggacaaggtgctcatctctggtcttcctgcctcggaactcaggctggaaaagtggtggcactgctcaaaaacactgcaagccaaactaacaaaccacagatgtctgttccaaagattacaatcaaaacacacaatagacggcctaaggctcaggagcaaaagctggggagagtttcctggggaaattagaagcacctgcatgcatagggggatttataaacacagggttatgcccacagcaagatgcatgctcagaaaagacctgagaagaccctaagttatgctcagctgatccctaggctcagggcaagctgggttaaatgttgaaagagtgctccagcacagggccaatctgcaaagactgagcgagggaaagattttttgtttggttggtttgcttgcttttttagctcctggtattcaagaaaatctgtcaaaacactagctgaacacaagctaaggaatagagacttcagtgaccacatgcgacaagtaatatagtctttgcaagaatagttttggaaagtcattaagccaaaactactacggtctttaacaataaaacaaacaacaaaccagcaaaccctgggacagtgggagaatctgacatccaaatttatcacattacaaatattcaaatgtccagtttttaacaagaaaaatcacaaggtatacagagaaaaaggaaattatggcccattgaaaggggaaaaaaaataacaaattgaaaggaattattcctgagaaagtccagatctgagacttactagacaaagactttaaaataattgtcttaaatatgctcaaagagctaagggaaaacatggacaaaaatctaaaggaaaccaggaaaacaatgtatgaataaaatgagactatcaataaagaaatggccaggcgtggtggctcatgcctataatcccagcaccttaggaggctgagttgggtggatcacttgaggtcaggagttcgagaccagcctggccaacgtggggaaacctcatctctactgaaaatataaaaattagctggtcattgtggcaggcacctgtaatcccagctactcaggaggctgagagaggagaatcacttgaacacaagaggcggaggctgcagtgagctgagattgcgctactgcactccagcctgagtgacagagtgagatcctgtctcaaaaaaaaagaaaaagaaaaaaaagtatgaaggccagaagacagtgtgatgacatacttaaattgctgaaagaaaaaaaatcaaccaataattcaacatctttcaaaactctttcaggccaggcgcattggctcacacctgcaatcccagcactttgggaggccaaggcgggaggatgacctgaggtcaggagttcgagaccaacctgaccaacgtggagaaaccccatctctactaaaaatacaaaaactagctgggcatggtggcacacgcctgcaatcccagctactcgagaggctgaggcaggagaatcacttgaacccaggaggcaaaggttgcagtgagccaagatcgcaccactaaactccagcctgagcatcaaagtgagactctgtctcaaaaaaaaaaaaaaaaaaaaaaaagcagagtttggcagaataattttatttttttatttttttttttttgagacagagtttccctctttttgcccaggctgaagtgcaatggtgtgatgtcagctcactgcaacctccgcctcccggattcaagcgattctcctgcctcagcctcacaagtagctgggattacaggcacctgccaccatgcctggataattttttgtacttttagtagagacggggtttcaccatgttggccaggatggtcacgatctcttgacctcgtgatccacccacctcggcctcccaaagtgctgggattacaggaatgagccactgcgcgcggcctagattggcagaataattttttaaaacatgatctatgtctttttttttttttttttttcgagagggagtttcactcttattgcccaggctgcagtgcaatggagcgatctcggttcactgtaacctctgactcctgggttcaagagattctcctgcctcagcctcccgagtacctgggattacaggcacccaccaccatgcccagctaagtttttatatttttagtagaggcggggtttcatcatgttggtcagggtggtctcgaactcctgacctcaggtgatccgcctgcctcggcctcccaaagtgctgggattacaggcatgagccaccacgcccagcctaaacatgatctatgtcttgtctacaagagactcactttagatgcaaagatacaaacagattgaaagtgaaatgatgaaaaagatatttcatgtggccgggatttatatataaatttaaatatatatatataatttaaatatatatataatttaaatatatatttaaatttaatatatattaaatttaatatatattaatttaaatatattatatttatatatatattaaatttaatatatatatttaaattagcgaggcatgatggtgcacacctatggtcccagctactcgggaggctgaagtgagaggactgcttgagcccaggaggacaaggctgcagtgagccatgattgcatcatgcattccaggctaggtaacagagcaaggctctgtctcaaaaaaaaagaaaggaaagaaggaaggaaggaagggagggaaagagagaaagagggaggcagagaaagagagagaaaaagagaaagagagagagagaaagagaaaaaagggaaaggaaggggaggggagggggatggagggggaggggtggagggaggggagggggatggaggggggaggggggagggaggggaggggatggagggggagggggaggggagggagaaaagggaaaggaaggggaggggaggggaggagggaggggaggggaggagggaggggagcggaggagggaggggaggggaggaaaagggagaaaagacaacacaccaaaacttatgagatgcagcaaaaacagcactgaggctgaggcaggagaatcacttgaaccccggaggcagaggctgcagagagccaagatcgcaccactgcactccagcctgggcaacaagagtgaaactccatctgagaaaaaaaaaaaaaagaaagccttccaacaaagaaaagcccacgaccagatggtgaattctaccaaacatttaaagaattaacactaatccttctcaaactcttccaaaaaattgaagagaaggaacacttccaaactcatcctacgaggccagcattatcctgttaccaaagccagatacagacacacacacacaaaaaaaaacccctacagatcaatatccctgatgaatattgatgcaaaaatcctcaacaaaaccgtagcaaaggctgagcgcggtgactcaagcctgtaatcccagcactttgggagccacgtgcaggatgattgcctgaacccaggagttccagaccagactgggcaacacagcaagacccccatctctaaaaataaaataaaggacaggagtgatggctcacgcctgttatctcaaaactttgggaggctgaggcaggcagatcacttgatgtcaggagtttgagaccagcctcaacaacatggtgaaacctcgtctctactaaaaatacaaaacttagccaggcatggtggcacatgcctgtaatccaagctactcaagaggctgaggcaggagaattgcttgaacctgggaggtgggggttgcagtgagccaagatcgcctcactacactccagcctgggaaacagagtgagactctgtctcaaaaaataaattaaaaataaaattacaaaaaaaaaaaggagactttttttttctttggattacaggcgtgtgccaccacacacagctaattttttgtatttttagtagagatggggtttcaccgtgttagccaggatggtctccatctcctgatctcatgatccgcccatctcagcctcccaaagtgctggaattataggcatgagccaccacgtccggcctttctctttttttttttttttattagacagagtctcactcacccaggctggagtgcagtagcatgatcatggcttgccagagcctcaaactcctgggctcatgcaatcctcccacctcagcctcctgagtagctgagaccacacgtgcacattcagaagactacttcaacatagtaaggactgtatatggggaccaggtgcgaaggcttacccctgtaatcccagcactttgggaggctgaggcaggcagatcacctgagatcaggagttcgagactagcctgaccaacatggagaaaccccgtcctactaaaaatacaaaattagctgggcgtggtggcaggcgcctgtaatcccagctactcagaaggctgaggcaggacccaggaggagaggttgcagtgagccgagatcgtgccattgcactccagcctgggcaacaagagcgaaactccgtctcaaaaaagaaagaaaaataaaaagcaaaacagtctttaataaaaacaaagtcaggccgggcatggtgtaatccgcttgtaatcccagcactttgggaggctgaggctggcagatcacctgaggtcaggagctcgagaccagcctgggtaacatggtgaaaccctgtctctattaaaaatacaaaaattttgctgggcacggtggctcacgcctgtaatcccagcattttgggaggccgaggcaggtggatcacgcgttcaagagatcgagaccatcctggccaacatggtgaaaccccatctctactaaaaatacagaaattagctgggcgtggtggtggcgcacacctgtagtcccaaatactcgggaggctgaggcaggagaatcacttgaacccgggaggcggaggttgcaatgagtggagatcatgtcactgcactccagcctggtgacagaacaagactctgtctcacaaaaaaaaaaaaaaaaaaattagctgggtgtgttggtgggcgcctgtaatcccagctactcaggaggctgaggcaggaggatctcctgagcctgggagatcgaggctgcagtgagctgtaatagcaccactgcactccagcctgggtgacaaaacgagacacttttttttcgagaaaaaaaaaagtcttggagaagatgtgaagaaactggaactcccgttaatcggtaggaatgtaaaatggtgtggctactgcagaaaacaggctggtggttcctcaaaaagctaaacatagggccaggcatggtggctcatacctgtaatcccagcactttgggaggacaggcagtggatcacccgaggtcaggagttctagaccagcctggccaacatggtgaaaccccgtctctactaaaaatacaaaaattagccgggcatgatgacaggtgcctgtaatcccagctactcagggggccgaggcaggagaatcgcttgaacccaggaggcagaggttgcagtgagctgagattgtgccatcacactccagcctgggggacaagaacgagacttcgtctcaaaaaaaaaccaaaaagctaaacatagaattatcatatgatccagcaattccactttagatatctacccaaaagaactgaaaacagaaatgcaaacagatatctgtgtgtgcccaggttcatagaggcattgttcacaataacgaatggtggaaactactccacttatccatctacagatgaatgaatgaaccaaacgtggtttatacatatgatagaatattattcagctataagaaggagggaaattctggccaggcgtggtggctcatgcctgtaatcccagcactttgggaggccgagacgggcggaccacaaggtcaggagatcgagaccatcctggctaacacggtgaaactccgtctctactaaaaataaaaaaaaattagctaggcgtggtggcgggcgcctgtagtcccagctactccggagggtgaggcaggagaatggagtgaacacggcaggcagagcttgcagtgaaccgagatcatgccactgcacccagcatgggtgacagagcgagactccgtctcaaaaacgaaaacaaactaagaaggagggaaattctgacatgtgctacaacatggatgaaacttgaagacaatatgctcagtgaaataagccagggccgggcgtagtggctcacgcctgtaatcccagctagtcgggaggctgaggcaggagagtcgcttgaacccaggaggaggaggttgcagagagctgagatcacgacactgcactccagcctgcacagcagattccatctcaaaaagaaaaaaaaaaaaaagttagccaggagcagtggctcacgcctgtaatcccagcactttgggatgctgaggtgggtggatcacctgaggtcgggagttcaagaccagcctgaccaatgtgatgaaaccccatctctactaaaaatacaaaaattagccaggtgtggtggcatgcgcctataatcccagctactctggagggtgagacaggagaatcgcttgaacccgggaggcggaagttgcagtgagccaagatgcaccattgcactccagcctgggcaacaataatgaaactccatctcaaaaaaaaaaaaaaagtttaactcagaaaaaaaaatgatcataaaatttgttattaatctggctaaaccctggcagaagagtcttttaataaacttccatgcgcaaagtttgattccaaagaaatgacactcatcctaagaaaacttcacaatggtaaaatcaacagttcataaaaactgtatgaaaacagcctgatttgtgcatcaaatgtttactgtaaggaacaccccgaaaaatgttcctgataaaaatgaattctatcaaaaaaaaactttggaaacagtttcactgcactgtatagaaaagggatccaggaatttgactggcttaatgcggtgtttgatggaaaagtcttttccaacagaaatgtgttggatttatttttttcccactgcgcttataaaaatggaatcaaagtgtcctgggaatgaaaccattttttgtgtgaaaatggtagtgcaaagagggggtcaaatgttctgttcatttgccttaggcttggttttatcccccagacaccagctgttgagtgtctcctaggcatggtcccagaaaaataactggtcacgacctcttcctagggaggttctggaccccaccttggcctgaacctccgcagaccactctgtctcccacattcctgctagtattctaggaccagagaccccaggacttttcttttctttccctttctttcttttctttccttccttcctttcttgcttgcagagtctcgcgccgtcacccaggcaggagcgcagtggtatgatctctgcttaccgcaacctctgcctcccgggttcaagtgattcccgagcttcagcctcctgagtagctgggattataggcgtgcgccaccacacttggctaatttttgtttttgtttttgttttttttgagacggagcctcgctctgtcgccaggctggagtagagtggagcgatctcagctcattttaacctccgcctccaggttcaagcgattctgctgcctcagcctcccaagtagctgggactacaggcacccgcctccatgcccagctaatttttgtatttttagtagagacggggtttcaccatgttggccaggatggtctggatctcttgacctcgtgatctgcccgcctcggcctcccaaagtgctgggattacaggcgtgagccaccgcgcccggaccctggggaggtttattaacagttccagaacgttggcagatgcaaaatagacaggaagagggagggagaggcagagagagctggacagaggccgggaccatacgtggatgtcagtcactgcttgcaaggccacacagagtctcctactacagagaaggttgagctctcagaccttaggaagtcctgacgtgcccctccctgggtccagccttcccttccccattctgaacttaggacatctagctgggcgaggtggctcatgcctgtaatcccagcactttgggaggctgaagtgggagaacctggcaccaggagtttccgactagcctgagcaacataccaagaccccagcctctaccaaaaaaattagccgggcatggtgtgcacgcacctgtagtcccagctactggggaggttgaggcgggaggatcattggagtccaagagttcgaggctgcattgagctatgttcgcatcactgcactgcaaactgggacacagagcgagaccctgtctctgaaaaataaataaataaaaacacacttatgacgtcaccctctctgctatgacaaggtccttccctgccccaccccctccagggcccatccctacatcttggggaggaaataagtccattttggtcagtcttgcccgctgtcagtaactgtccctacgaattcctctctagcttgaaggattctccacctctcccttctctgttaaaagagtcacgggcccattttcattcattcattcatcaaatgtttataagcagtttccatgctggggacctggaagagacccgacctaggccctgcatcccgactccccgaggatctatcagcctgggaggatggggaatgggagggcctatccctccccacgatcacggcgcgaaccgagctttgatggagaaacacgcggctctgtgagctttagagaacacatttaacctggcctggagtaagacaggggacgggcctgaatcttttatgggacccgcccccaatatcaaccgccccgtccccagcacagaactgggctcctagacgacacggtgccatcacgtccccagtgagtcttcaggatttctggccacgccccttctcagacccaacccccgagcccctcccttgcttgaccccgccccatctctggcctaggccacgccctcctcttagccccacccccatttcattcaacccaggcctcaagccccaccgcccaggacgccaatgctcccaccaatctcacatacccattggtcagagagtgtcactttcccgccctccttcagtagcattggttccctaggtgtcaatcttctttatggcgcccccagcagttgccagggcccaggtttgaggggcagataataatggacgtctcggggcgtctcgttattgggcagaaagcccggctctgggcggggcttagtgccaaacgcttggccgcgtctgcctggtgttcctcagggccgcagcctttcctcacggacacacccccactttccttgctattggtcttatcaggtgttgatcaataggattcctcattccgatacgcaaaactacctgtccttcaccgcttccctcatttcaattcgctctctcctcagaggcggcaaccttctgaacgtagccagggcccgcctcacggaatggccacggaatggtcagacaccccgtcactcctggctggtgggcggggccagggcgcctgggggcggcgaattggcggatggggcctcgggggcggggcagcggctcctgtcagcgggtgaaatggcagcggcggagccggcggcggccgcggtcccggggggcggctgagggggccgggccggggctgcggggcgaacggcgcggctaggatccggcggctcagcccggggcggcgaggctcggcacggagatggcggcgcgctcggcgcaggtagggcggcgcgggccgggcctcccgggcgcctgctcaggccggcggctccgtgatgcggcccgcggggaaccggcaggaccgcaactcgggccgtcgtgccccggaacccgcgctgggagcctcggcatccccagcccgggaccttcggaggaccctggcccctgcccaccctcgttgccgatccctccggacccctccccaggagctcctgcaggatccccctcccccactccgtcccctccccatgaggaccccgcaggcccaggacccccgtccaccctttgcagtgaccctcaggactcctctccgggaaccccctcagggctccccatccccccactccgccgatcagcccctcagaagcgccccccaagcccaagaacccccgtccaccttctgccctgatctctcaggacccctcccttctggacaacacttgccaccccctccccgcaccccctcacttcacgtcctcctatcttgggcccagaactgcccccacctctccccaaggagaccagcctcagggcctacccgccccccatgctgaccccacaggacccctctctggcctctgtaagtcggatttcctacccctgcccacagccctcagctcagcctgctagcccatctcccaccccagctgccacatgcccaagggcacccctaaacaccactccccggcgtccacccagcacactgtggtagctccactgatcctgccccatctggatcctggctcctggatcctgaaaaatccacccatgctcaagacctcccgttggatattctgaaccaccccactccccatccagagccacccatctttctgaaaaccccaaacacacacacacacacacacacacacacacacacacacacacacacagtcacttagatcccccagcacacacagaaaaacttaagagctccaacatagaccccaggcatatctgcccctgcccccacccactcaacacttctgcacccctcctcagatcccacctgtccaggccctcccagagtccccgacagctcccccagctcaagcagagattccagagaccatgaggtgcctgccgcaccccaggaagccaacttgcccctccaccaaaccagcgcccacactggagccttggagggtgacagggccccagaatcccccagcacctacccctgtgggaacctgccccaggcctctgccaagttatccatccttccctgctgtgccctttcaaagggaaggacgctcactttctctcctacactagtgtcccgaaggaaccactgcccgccccctgatttatgccaccccctggcgggaagggagaggattcacagctcctggcttccgtcctgaagtctgcccccagcctcctgaccccatcacgcctactggcctcaaatgccagagccagcagggcggtccaggttgctcctcagagctggcccctgacagcccgagagttctttcacccacaactagtgtgtttggccaaaacaaaacagcttccttctatcttggcatttgagacctgggtcggggcctgccagaagcaggcagctctttgttaaggaatattttcagaagggaaaaatgtgctgaagaggctcgagtggaacatgaatgagttgtctgcttcgttttattccccctcggccgggatgtgattgagctagaggacccgtgtccctgtgtctttccgtcttttgtggctcttcccatccatcccgccgccctccccactcccagctctggcctcagggtccaacctgtaggttcctctgggcttctgtggtcagcggagggtggtttggaagggatcgcaggtggcttggccctggcacagggatgagacaagacaggagaggagatgctggcgcgacactgtggccaggactgcagggggcgaggagccgggccggtccagtcccgcgcagcctgggcactgtgcgtctggggtccttctgacaacataactgtgctcagaaaccctgagataaaaggcccaggcttccttgtggatattcactagcggattgtggaccatccaggaaaaagctcattgcggctcagtacctcaacttccccatcggaaactggggtgcggggagagcggctaaatttttagaacagaacttggaactgcaggaaggctagggtgtggccctgtgtgttcccccagtgccgtgtggaaggggacagcaaggtctcggaggggagtcctatgggctcctgtgaatcactggccacccaggtccctgcgagggtcttagttgacacttcattgaaaagtggccatcttcctagggctgagctgtattgcagggagccagctcgaatcagagctggaagaatggagatgagagatggtctgctgcaggacttgtggttatacacagggtcttcccaggaggaccacggggaacagggtgggcatgaggggctgtcggatagccatgctgaggccccacatagatctctgatgccccacatagacctctgacaccgggtaggaagaggtttgttctgtccacttgctgaaggaaggcgtggaggaaaagactcctgaaggtcacgtggtatctctcacgcacaggaaactaaactctacagcctccccagggtggaattttgtgcagagacagtggggtatgaaggcttcccaggatgactgtgaactctataggaaaccacgaggaggacttgtcagtgatacgaacgcagttttacccgagactgggctcgtggagctgcatctttgtttgagctttgagggggcagacggatgaggaggaatgtatatttcaatttcctcttgcagaatagagatgccagttgttacagggaagccctgggcctggagtcagatgttggggtgtgaaggaatgtaagatgtgtacaatgtggtccctgctctgcgtctaaagtcctctcactggcatgcggcggcccccgccatgtgctcagcaccatgccaagcaccattgacatattatctcatttaatcctccccaaaactcggaggaaccaggattgcagcacgcgcccttgccatcctggcctgaggcctgctgcggggagcatgagacagaattatgtacagcaggctgcaatgggagcccggaaaaaaagcctgatgcatccctggggtgttggggaaggcacagcagggatgacgtatggaccaggtcacaggcaggcgtggcagggaagggtgttccaggcagcagaagtgcttggacacacgcccaagaggcaggagcaagcgtggtgcgctcagggaggcgtgtccctgtacttcctttgataggcgtcttactacaagcccttgtgtccccagtgccatctgtacacttggcacacatggtggggggctccccagcaaaggggatccctagttgggagaacttggaaaggcagcaaagccgcccttcccagggaagactgcagcacacacatgctagcagcccgggcaatagaaggaaggaggtgagtttaggagaactaactcagctcatcagggtcagggagaactaactcaattcatcagggttagggaagagacttacccttttgagggagatttggaaggcctcattggcatgactcacctgcactttcattcatttctcagcatgccacgatatgcttgtgagagtgtttgattgaaatctgaggcccggcacggtggctcacgcctgtaatcccggcactttgggaggccgaggcgggtggatcacctgaggtcaggagttcgagaccagcctggccaacatggtgaaaccccgtctctattaaaaatacaaaaaaattagcagggtatggtggtgcacacctgtagccccagctcacttgaacctgggaggcagagcttgcagtgagccaagaacgcgccactgcatgccagcctgggcaacagagcgagactccatctcaaagaaataaatacaaattttaaaaatttttaaaaaaagaaaaatgagggttttgccagaagggaacctattataatagccaaaagtaatctggtcagatgacaagaaagaaaatttttttttaggtcagaaaggattctgcaggtcagaatggttcacttctcagattttagccaaaggtgtgtgctgctgttgctgctattgttatcaataaagattattctagttttactgtgtttactctttaaacaggatcaccacagaaagggagggcctgttgaagaggggaagtttatttatcccacaaatatgggatgcctactagactctgaagatccaatagtgggctagacagccccagcccctgccctagtagaacttttcatccagaagggaataaatatcacaggtcaggcttgtcctaagcacatgacaggtttaagctcattgattccttccaacaaaaactgtggggtagatactgtcattagccctgttttcagataatgaaactgaggcaggccaggtgcagtggctcacgcctataatcccagcactttgagaggccgagtcagggagataacttgaggccaggagtttgagaccaacctgggcaacatagtgagactctctctctgcaataataataataataataacaaaattagctggacatagtggcaagtgtctgtagtcccagctacttgggaggctgaggcaggagaatcacttgagctcaggagttggagcctgcagttggctatgattgtaccactatactgcagcctgggtgacaaaacaagaccctgtctctaaaaataaaataaaaataaaaataaacaaaaaaaattgaggcaaaatacatcatacccaaggttacaaagatagaaagtggtagaggaggccaggagcggtggctcacacctgtaatcccagtactttgggaggctgaggcgggtgcatcacctgaggtcaggagttcgagaccagcttggttaacacagtgaaaccccgtctctactaaaaatacaaaaattagcgaggtataatggcgggcatctgtaatcccagctactcaggaggctgaggcaggagaattgcttgaacccaggaggcaaaggctgcagtgagccaagatcgtgccactgcactccagcctgggtgacagaggtagactcggtttcaaagaaaaaagaataaaaagaaaagaaagaggtagaggaaggatttgaacccaggctgcaagctctgaagttctcacctggagccaagagatctgggataacaacctacattccaaggccagggatatggaaacttccagaaccatgtggaggagcagctagactgggcgcaagaagagatcaggcagggacctctgaattcaagccgctgttcttgttatccaaggggcagctcacctgtcagttgtccgcccacaccttgccaaggacgagaggacctaaggtgctaggttgggccatttccccagaggtcagagccagccaagacagcagcagtctgtcaggctagacaaatcggggtcacatggcatcttgggctttagattccgaaatgagtctgtgtccctggtaatcattagacatggaggaatcagaaatggggggtagggccgggcgtggtggctcacacctgtgatctcggtactttgggaggccgaggcgggaggatcacctgaggttaggagttcaagaccaacctggccaacatggcgataccctgtctctactaaaaatacaaaaattagccagatatggtggcacgcacctgtaatcccagctactcgggaggctgagggaggagaagtgcttgaacccaggaggcggaggttgcagtgagccaagatcgtgcaactgcactccagcctgggctacagagcaagactctgtctcagaaaagaaaaaaagaaggaaatggggggtaggggagtaagggaaacaacatggaaaggaaactcggggtcttcattgctgtctctgaaaatgccacagactgaaagatgcatcatatgtgctcgccctctctcaccgttgaaaaataatgactgttttcactgagtaacccctgcacttggggtttcacatacgtgtatcattcccaaagtaaaagaatacagacagagctgcagcacagcgggtggatttagggcaaaggctatacagtcagaaatccaagttcaaatccttcttcctcctcagcctagtcaagggactctctgtgccatatggcacttgtgtgttaaagccgtcgttggcttttctgcttacactgtacagaaatttctatttttatttttttcatttttttttttagacggagtctctcactctgtcatccaggctggagtgcagtggcgtaatttcagctcaccgcaacctctgcctcctgggttcagcctcaggagtagctgggattatagccatgcgccactacacctagctaattttgtatgtgtgtgtgtatttttaatagagacagggtttcaccatgttggccaggctggtctcgaactcctgacctcaagtgatctgccccccctcagcctcccacagtgctgggattacagacatgagccaccgcacccagcctttattattatttttaaaatagacttgggctgaggcaggaggatcccctgtggccaggagttcaagaccagcctgggcagcagagtgagacccctgtctcaaaaataaaataaaatggccagttgtggtggctcacgcctgtaatcccagcactttgggaggctgaggcgggcggatcacctgaggtcaggagttcaaaaccagcctggccaacatggtgaaaccccatctctactaaaaatacagaaattagccgggcgtggtggtgcgcacctgtaatcccagctacttgggaggctgaggcaggagaatcacttgaacctgggaggtggaggttgcagtgagccgagatcacaccactgcactccagcctgggcaacaggagtgaaactccttctcaaaaaataaaaaataaataaaataaaataagactattttgtagaacactttgagatttatggaacaattgagaagacgatacagagtttccatatgccccatacccagtctcctctatagttaatgtcttccattcatatgatacatttgttgtagttaatgggccagtattgatatattattattaactaaagtccacctttcattcagatttcctttgttttttcccagtaaccttcttccatcccaggatcccacatgacatttagtcgtcatgtctccctaacctcctctgggctgtgacagtttctcagactttccttgcttttcgtgaccttgacgtttttgtttgtttggtttggtttggtttttgttttttgttttttgagatggagtttcgctcttgttgcccagggtggagtgcaattgtggtgcagtctcggctcaccacaacctctgcctcctgggttcaagcgattctcctgcctcagcctcccaagtagctgggattgcaggcatgtgccaccacgcccggctaattttgtatttttagtagagacagggtttctccatgttggttaggctggtctcgaacccctgacctcaggcgatctgcctgcctcagcctcccgaagtgctgggattacaggtgtgagcccccatgcccggccaaccttgacggttttgaggaaggtggagtaggtgttgtgtagaatgtcctctaatactgatctgtctggtgtgtttattttttttttggttggtttttttttgttttgttttgttttgttttttgagacggagtctcgctctgtcacccaggctggagtgcagtcgtgcaatctcggctcactgcaacttccgcctcctgggttcatgccattcccctgcctcagcctcctgagtagctcagattacaggcatgtgccaccacgcccagcaaatttttttgtatctttagtagagacagggtttcatcatgttggccaggctggtctcaaactcctgacctcaagtgatccgccggccttggcctcccaaagtgctgggattacaggtgtcagccaccatgcccagccactctggtgtttctcatggttagactggggtcttggggaggaagaccacaggggtgaagggtcctttctgtcacatcctatcaagggtacgtgttagccacgtaacttatcactgttgatgttgaccttgatcacctgcctaagcgacatggaaagtttcatcttcatttattcaacaaacgtttgtcgagcatgtactgaatgccagatagtgcattaggggcttggaatagagaattaagaagagaggctcttgtcctcaaatcgtgcatgaccctagggcaggcaggcaggcaggtttagaaataattgccatagaatgtgcattgggcttgggtgtaggcagaggggtggatgttttcagggagagagagggggaaaagcgagccaggatgctggaagaagggaggttgacagagaagttttcacagaaagaatggccaaaccggccaggcacagtcccagcactttgaggagccgaggcgggaagattacttgaacccaggaggtcaagtctgcagtgaacagtgagctatgatcataccagtgcactccagcctgggagacagagcaaaaccctgtctctaaaaagaaaaaaaaaaaaatccttggccaggcacggtggctcacgcctgtaatctcagaactttgggaggccaatgcgggcagatcacaaggtcaggagatcaagaccatcctgggtaacacagtgaaaccccatctctactaaaaaatacaaaaaattagccaggcgtggcggtgggtgcctgtagtcccagctactcaggaggctgaggcaggagaatggcgtgaacccaggaggcggagcttgcagtgagccgagatcgcgccactgcactccagcctgggcgacagagcaagactccatccatctaaaaaaaaaaaatccaaaccgggtcttggagaatgcccttccagtcagagggaacagagtatgcacagacactggcagacatcaggagacccatgtgcctggaggactgagtgtgccaagcagggatgcagaaagaggcgaggctgggaagggcatgcacgtcttgcaaagacatctgggctccatctcaccattgggagctgctaaagggtcttaggcaggcaatgacgtggcaagagctgcagttctgtatggttctggtggccccatggacagagcatcagaaaggacagaaagttcaatggacgtggcaggcgccatcaagacagcagctttggtggggcacggtggctcacacctgtgatcccagcactctgggaggctgaggcaggagcatcacttgaagccaggagttcaagagcagcctgggcaacatagtgagaccccaagtctccaaaattagaaaaattggcaaggcatggtggcgaatatctgtggtcccagatactcaggaggctgaggtgggaggatcacttgaggccaggatctcgcaccactgcactccagcctgggaaacagagcaagaccttgtctctaaaagcaacaacaacaacaaaaagacagcagcttccagcctggagagcagaggccagttgggagtgaggtgtgggatgtgggtggtagacttggctgagctctagaacatgagaagggaggaggggaacacccaggcctggccagagtgggtgggtggaggtggcaggtggcaccggggacccagatagatgcacccgcagtaggacaaggggcctgcttctgtcaggaaagcattgaatttgaagagcatctccgcatgaggggccagaagggtctttctaaaatgcaaacctaggccacgggcagtggctcacgcctgtaatcccagcactttgagagacccagacgagtgaatcacttgaggtcaggagttcaagacgagcctggccaacatggcgaaaccctgtctctactaaaaatacaaaattagccaggcatggcggcacatgcctataatcccagctactcgggaggctgaggcaggagaattgcttgaacccgggaggtggaggttgctgtgagccaagatcatgccattgcactccagcctgggcaacaagagcaaaactccatctcaaaaaaaaagaatcaccccaattaaagcttacagtttggtggcatttattccaactgtgttgtgcaaccatcaccactatctaattctggaacatttctatcaccccaaaaagaaacctacacccataagcagtttctccccattcctccctccccctggcccctggtgaccacaaatccactttctgtctctatggattgcctattctggacattccgtataaagggagtcacacagtgtgtggcctttggtgtctggcatctctcactgagcaccttgttttcaaggttcatccatgctgtggcctgtctcggtgcttcactccttttcatggctaagtaatattccactgtctgggtggaccatgttttgttgatccattcacccgttgatggacatgtggattgtttctgctttttggctgttgtgaacaatgctgctgtgaacagatgtttgccgttctcttgcgttgagccctacgagtggatttgccaggtggcgtggtgacagtgtgtttaagtctttgaggaaccgcctgactgttctccatcctaccgtattgtttactgcaagcatttatctcaatctgtgaaggagggtctgggtgattgtttcttggtctctgccccggacactccaagagggcacaggtgattcctgcctctgcgggggaaacacagaacatggaatggtgggtgggctgggggctgatggagctgttctggcaacttgggcaactttggccagttcttgagagaaacgaaaagctggtgacatacatttggtcatttaagccccaagaatgagatccccaagggcatcaagatcaaggccaaggagggacccagggaggaagagatgccacgtgggagaatgagaagtcccggccagagaggcaggaaggaagccaggagcccagtcctcatcagccaggtgggagggggcttagggaaggaggaagcatgcgcggcagtgcccccgagagggaaagccaaacggaagtcgaagatgaccagcattccagcactttccgtccccacgccccccacaacccccaaacacagcccctttccagtgctctggcctggctcagcttcctaagctgtaggtggccctgtggaggtgtggcttgagtgggtgctggcaggggcagggtccaggaccccccttcagatggctgaggagcagttgagggtgaagcattgaaattaaggacacggagaggctgggaccccagacccagaggccagtgggtgggttgccaaggcctgtgcccatccagcatagggagatggagatggggcctcccctgcctcgctccctaccatgtctcctgcctagacagtggccggccctcaggtggccctcagtcagcaccaggaaggagtgattgagccagtgagggtcatggcacagtgggaggggtgcagggtcgcccacagaatcaggacagcagcccacctccaccccaaacctgctctgttcccagggggtgagcgctgctcggtgcaggaagtgtgtgagcgcgtgtgtgtagatgggtgggaatgaatgtgtgtgtgcctgagtgcgggtgcaagagtgtgtgtcaatgggtatgttttgtgttgagaagtgtgaaagagtatgtgtgtatgcctgagtgtgtgaatgtatgtcatgtgcatgtgtatgaggtgtgtactgtgtgtgtgaatgtgcatgggtgtgtgtgttgtgtgtgcatgtatatgtgtgtgtgtgaatatgcataggtgtgtgtgcatcaagtgtgtgcatgtgtacatgtgtatgaatgtgcatgggtatgtatccagtgtgtgcgtgtgtgagaatgtatgaatgtatgtatcaagtgtgtgcatgtgtgtgtgaatgtgtatcaagtgcgtgcatgtgtgtgcatgtctgtgagaatgtgagtgtgtgtgtatcaagtgtgtgcatgtgtgtgcatgtctgtgagaatgtgtgaatgtgtgtgtatcaagtgtgtgcatgtgtgtggggatgtgtgaaagtgtgtgtatcaagtgtgtgcatgtctgtgaattggggtgtatcaagtgtgtgtatgtgtgtgaattgtgtgtgtgcatgtatcaagcatgtgtgaatgtgcatgggtgtgtatcaagtgtgtgcgtgtgtgaaaatatgtgaatgtgggtgtttatgtatcaagtgtgtgcatggatgtgtgtgcaaattgtgtatcaagtgtgtggatgtgcacgagtatgtgtgtattgtgtgcatgtgtgtgaaggtactgggtgtgtgtgtatatgagtgtgcgtgcacaaatatgcataagcatgtgtatatcgagtgtgcacatgtgtgtgtgaaggtatataggtgtgtgtatctgagtgtgtccatgtgtatgtgtgaatgtgcatgggtatgtgtgtattgagtgtgtgcatgtgtgtgtgaaggtaccgggtgtgcgtgtatccgaatgtgtgcatatgtgtaaacgtgtgactatggatgagcacgtgtgttgagtgtgtgcatgtgtgtataggtgtgtgagcgtgtgtgtgagagaataggcatggctgtgtgtcgagtatgtgcatgtgtgtgtataggtgtgtgagtgtgtgagaataggcatgggtgtgtgtgtcatgtgcatgtgtgtgtataggtgtgtgagcgaataggcatgggtgtgtgtgttgagtatgtgcatgtgtgtgtataggggtgtgtgtgtgagaataagcatgggtgtgtgtcgagtgtgtgcatgtgtgtataggtgtgtgtgagaataggcatgggtgtgtgtgtcatgtgtgcatgtgtgtgagagaataggcatgggtgtgttgagtgtgcatgtgtgtgtataggtgtgtgagtgtgagaataggcatgggtgtgtcgagtgtgtgcataggtgtgtgagtgtgagaataggcatgggtgtgtcgagagtgtgtgtgtatgggtgtgtgagtgtgtgtgagaataggcatgggtgtgtcaagtgtgcatgtgtataggtgtatgagtgtgtgtgagaataggcatgggtgtgtcgagtgtgtgcatgtgtgtataggtatgtgagtgtgagaataggcatgggtgtgtgtcaagtgtgtgtgtataggtgtgtgtgaataggcatgagggtgtgtgtcgagtgtgtgcatgtgtgtgtataggtgtatgagtgtgtgtgtgtgagaataggcatgggtgtgtgtatccaagtgtttgcatgtgtatgtgtgagagtttgtatgtgagtgggggtgggtgtgaatgtgtgtacatgcgtgagggagtggggtggctgtgaagagtgtgagagtgcatgtgtgttgtgcgtgcacacacgcttcaggaggatggtttccactgagagagtctggggatgagtggagagaaagttccggtgggatcagaaggttcctgcctctcagactgcaagtttcagccctgtgtatttaatacatttcacttcctgtatgaaatacacacacattcgtgataaatagctgaacaacctctgctggtggacggctcccgggtttgggggatttttaaaatcagaaactgaggctcggctgggcgcggtggctcacatctgtaatcccagcactttgggaggccgaggcagatggattccgaggtcaggagttcgagaccagcctgaccaacatggtgaaaccccgtctctactaaaaatacaaaaattagctgggcgtggtggcacgcacctgtaatcaagcaggagaatcgcgtgaacccgggaggtagaggttgcagtgagccaagattacgccattgcactccagcctgggcaacagagcgagactccgtctcaaaaaaaaaaaaaaaaaaagaaagaaagaaaagaaaccgaggctcgggcagagattgggtggggctgatgccctgagcttgggtttctttggttctgaagctctcactgctccccaactccatctgtggttctgaggctccagcctcacctccaccacctcctccccattctcccagctctgaagctaccctcccagcccctccctgcccagagaggtccttctgatcagcacttcttgtccacagcccccgtctctgtccgggcagactttgactctgtgggaggccccaaagtggcccccactgtccctgcctcgggaatgattaactcctgattaggtggtgcccagcagcttggtctttagggcaggtggccctggcccacttggcaatgagagttccttccactccccaaaatccaaaaccctcagcacccggcagactaggggaacgcttgagggcccaaggtagaaccagtagccttggggagccacagaggcctggagaaagagggttctgggtccccatacagtgaaaaaagaatggcgcacctcccccaaccctattccaggaggactggggtggccagggtcaagtccatccaacctgtaggccctcaggggttggttgggggctgagtttgggctgtgggaaggtgcccagtgacccaacggtagtcaggcaggtatagagtggtctgctatggtcccgccaatgtccccctgctgcctggggatccagatatccccactccaaggacccagcgaggccctctctgtaggtggagctgtcagccaggtcaggtggggtcaagtggcacacggcagactcctgctacagagcgtgccgggcagtgggcgggcatgaggagccgtgcaaataaggaggcaggaggcagggtttccttcctgccatcaggaccctaggtatccccatcttctcagacgctggaggtgagcctgggctcaccaggaagaagcatgaaggaacaccatccccagccgctgcctccactcccatagccgtccctttcctctagggccccctgctaggggtcccctggccatcagtccccacacaggccacagcagaacccaggagccctggctccaggatggacagtgatagccgatgtccgtggggccatcactgagtgtcaggctctgttctgaccaggttatgtgcagtcatgtgctcagtttccacagccacccttgaggctaggtcctgtatgatctcagtgtacggaggctcagagacaccaagtgactggcccaaggtcacacagctggttgaggggagccatgcttcagacgcagatccatttgagcccagtacctttgtttttgacatggcattgatctgcctccaccagggtggcagaaggcgagaggccagtgtccttgaagcccccagaagggtcgggccagatgacacggcaaaaagataggagagatgtgcctgggactcacctggcacgtggcaggccaagatctggatacggatcggagcccacagctctggctctgtgtctgccagggcacagattcccagcactctgccacgtccctggcttctcaacccaaggggagtcgactcttctggccattggcagcgccagacaattaacagtcgaaagtaattgctcttggccgtgccagcagcccactttggttgatgagatggggaagtcagacactgatatggggctcccagggcaggccgtggcggggacggggacaaagctattaggaagggccagaaaagcagggggctcctgcaccccgaggtcccagcagggtccatggagccccgagtgacagggagcctctgctccgggccctgctccagcctcaggggtgtcgagttgagccttggccttcatgcccagggacagcaggacggctcacatcctggcaacagtcctcccatctccatccagacatccggcctgatgacacaggcagggatcccaatcgccagggtctcgaacagaaggggcagcatggctgtcagctgggctggggcgcatggggatgaggggtgcacggacgggggtggaccagaggcaggaagcccagggtgaggaaatgtcccgagggtgggcaggcaggatggagtgggctcccacccaatgccgaccacgcatgtctctggcccccagacagagctgtgaaccaaccccgctcacggctaacaagcccacccaccatggcgagccccactctgagccccgactcctcatcccaggaggccctgtcggcccccacctgctccccaacctctgactccgagaacctcagccccgatgagctggagctgctggccaagctcgaagagcagaaccggtgagttgggggctgggggatggggtgaaatcttggggtgcagtctgggcccccacaggagttcccaggtgccctcacattcagagccaggcccagtgtgtgcaatgtgacagccacctccagatgctggatgagggacagacacctcctttcatcctcccaaccctggctgaatatatgtgtccccaccctgttcagatgagactgaaggtttgagaggtcaagtgaatctgtgaatccgccgcggttaatggagccaggactggaggaagagtcgattcgggccttcctgctttcttcctctgaccctacccccatttaaaatgcaggttttaggctggacgtggtggctcacaccaccgaacactttgggaggccgaggcagacggatcacttgaggtcaggtgtttgagaccagcctggccaacatggtgaaatcctgtctctactaaaaacacaaaaattagctgggcatggtggtgggtgcctgtaatctcagctacttgggagcctgaggcaggagaatcacttgaacccgggaggcggacgctgcagtgagccaagatcacgccactgcactccagtctgggcaacaagagcaaaactccgtctcaaaaaaaagggggcgctgagggcagtggctcaagcctgtaatcccagcagtttaggaggctgaggcaggtggatcacctgaggtcaggagttcgagaccagcccgaccaacatggtgaaaccccatatttactacaaatataaagttagccaggtgtggtggcatgcacctgtaatcccagctactcaggaggctgaagcaggagaattgcttgaaccaggaggcagaggttgcagtgagctgagatcacaccactgcactccagcctgggcgacagagcaagactccatctcaaagaagaagaaaaaaaaaagaacaagagggacctaatccctggtgtcctctaagacccccaggagggggaggatgggctgggctcgccaaggatccctgtccccagggagtcactggttcccctctgtcggcccttcctgcccaggctcctggaggccgactccaagtccatgcgctccatgaatggctcgcggcggaacagtggctcctcgctagtgtccagctcctcggcctcctccaacctgagccacctggaggaggacacgtggatcctgtggggccggatcgccaacgagtgggaggagtggcggcgcaggaaggagaagctgctcaaggtggggggcggccaggcaggcagggctgggccgacggcgtgggcaggtggtgcggtcactcagccaccaggcagcgccagggtctgcggggccccagcctgggcacagcggcagcagtggagatgtgcaggcactttcagggtgtcctgccagagcacagggacaggagagagtgagtcagggtggtgctggacaggccctgcaccctcgagtgcccatgtgcttgctgccctgtagtgcccatgaaggatgggggtgtggtggctcacgcctggaatctcagcactttgggcggccaaggtgggaggatcgcttgaggccaggagttcgaggccagcctgggcaacgtaatgagactccgactctataaaaagtttaaaaattagccaggtaggccgggcgcagtggctcacgcctgtaatcccagttcgttggaaggtcgaggcaggcagatcacctaaggtcaggagttcaagaccagcctggccaacatggcgaaactccgactctactaaaaatacaaaaattagctgggcgtggtggcgtgcacctgtaatcccagctacttgggaggctgaggcaggagaatcacttgaacctgggaggcaagaggtagcagtgagccaagatcacgccactgcactccggcgtgggcaacagagtgagactccatctcaaaaaaaaaaaaagtttaaaaattagccaggcgtggtggtgcacaactgtagtcccagctactcaggaagctgaggcaggaggatcgcttgagcccaggagttcaaggctgcagggagctatgatcgcaccactgcactccagcctgggtgacagagggagaccctgtctctgaaaaaagggggtaaaaaaaggattggggaccatgagttctgtgccatgcttgaggcctggatgagccacgcctgaggagctgggctgggtggccacggggaggctgcgctgggaccgagtccagcccccgcttcccgctcccgtggccaggagctgatccgcaagggcatcccccaccacttccgggccatcgtgtggcagcttctgtgcagcgccacggacatgcccgtcaagaaccagtactccgagctgctcaagatgtcctcgccgtgcgagaagctgatccgcagggacatcgcccgcacctacccggaacatgagttcttcaagggccaggacagcctgggccaggaggtcctcttcaacgtcatgaaggtgaggcccagggctccccgctccctcggtcccaaaggaaggagaagttccccagttcaccggctgtgctggacggcgggaccctgctctcaggacttgttcccttctaggcatactcgctggtagaccgggaggtgggctactgccagggaagcgccttcatcgtgggcctgctcctcatgcaggtaggtggctggggggtggctgggctcctgccagacaacagcccaccctgggctcggcccccaagagatggacagaagtggcgtgtcctccacccagcgtcttgctaggggtagatcctccttctccatccacacccgtgacctctgccaatcgccaggccaaggcccagtgagtggcacctgtctggttgggtcctgtctgctgtaccatccaggacagagaccgggtttggagggataggctgtctctctctgccacatctcagggttggacaggaacctcaggctggggacttaagccatccagcgtggtgtttatggggcttgggggtctcctccagagaaatcgggaggctgacagggagagaggacgcagctgggacaggaggtatcctaaccagggggatgctggcagtggccagccctgggttcaggtccagctcccctgtttcctgccgagtggcccttggcaggtgacctcagcctcaggtcttccatcagtaaaacagcttgtgaggacacagggaccaacagtgtgtcatgagagtctagggagccaggtaccgacatggacatgggcccctgtaccccagggccctgatgagcagcgagatgcccctccccgctgcgctgccctgagcccccccacctgcccgtcccccctagatgcctgaggaggaggccttctgtgtgttcgtgcggctgatgcaggagtaccggctgcgggagctcttcaaacccagcatggccgagctcgggctctgcatctatcagttcgagtacatgctgcaggtgagcagggccgcaggagagcagggctgcaggagggcagggccacaggtgggcagggccgcaagggagcaggatcgcagaagggcagggctggcaccctagaccatacccgggcacctcttggactgaaaattccaagcctgtgaaatcacacctggacgttccaactccaaaaggcactcctctttccatgcagcactgccctgaaggatgcttggaggaacaggagagccaccactgaaggggggctcccagggctgctgaggcagaggggtggggcaggctcacatcggacacagccacagccacctccctgtctgctccagagtgtggtggaaggagggagtgttgtctgcctgcctgattactggagagccgcagacgtctgtttataaatagcagcccccgcagggcctgctcccggctggcaggcagagccgccaaggccgtttgcgaacatacacacacccgcatgcatacacacacacgcagacacacacacacacaccggcccgcctcagctgccatggcaggtggggctgtgcagtcatccctggatgtgacagccccactccctgggcctggatcatggacggtgctgtagccttagggggcctggtagtgccacaagcaggaggcctgggctgcagagaaggcaccaccccacctcaggctgggtagcagagccctcccacagccaagcttgcaaactcagggcgcagagagcccctggcgctgggaggaagcccgggatcctaacgccttctccggcctcagtttccccagccgtctgccactttctggctgtctagagttcaggccaatccaacacagcttgcacaaagctttatgctggggtccaagggaggtacagtggctggcaggtcacgtaacaaggtggggggggggctccccccagggccagaggctgccacttgcccatgctccacctctgggtctcagggtgtctgtggggagtgacccaactcccccagcctcagacacaccctctcaggctgtcgtgaggaccccatgagctgccacgggcgcatcacctacccagggtgggcccccaacacaggcggctacagatcttgccatccctgcctgtcccccaccccgtgctactcaaagctcgggggtgcttcggcctccctcagacagagtgctgagggagcaccaggaagggagcctcaggctgcccagcgcaggtccaggaaggctccctggaggcggggacactgaggcccagcaccccccggtgggagggcgtccccctcactgtgcccacccggcctcccacccctgcaggagcagctcccagacctcaacacccacttccgttcccaaagcttccacacatccatgtatgcctcgtcctggttcctcacactgttcctgaccaccttcccactccccgtcgccacccgggtctttgacatcttcatgtatgaggtgaggaccgatggtgcctggggagggaagagagccccttgggggtggttggaacaggagcctccctgccctccacctcccactgcctttgccgcctttgcaggggctggagatcgtgttccgagtgggcctcgccctgctgcaggtgaaccaggcagagctgatgcagctggacatggaggggatgtcccaggtgggccgggagggccagggccggtggggctgcccccaatcaggggcttcgagtcacaggatgccctcacaagtgacagagagggcccggcttcgagggtggaaggtggtgtgcctgacatccctgatctgttcccatccactctgttcccctgaggtctccctaagggaccagaggaccccctaggctctgccagacacagtcaggggccagcagcctggccgcagggagacaggaggcccaggctgagccctgggagccccactgcccacctcctgcccccaaccccgcagatgccccaaagcctgatggcagatcatgactgactgaccatgagggcatccccaccctgccgcccagcctggtgagggcacaggagggagtttgggggtctaggcaacctcacgccttgccccgccccagcccggcctgcctggaggccctgctgctggccagcctgcctcccaccgctacttctctgctgtgcgggcccctgccccctccccgcgtcctccagctggtgcttcagggaagaatgcacaaaggccacggttgtgtccgtgaacatgggcaggcattgtccacagctaccagagggggccagctgggccgggtgcaggagctgtgtcccccctgggcttaccttaaccctttgcacaggcccgaggcccccggcatacccatcctccttcccccacgaaggtcccctctgtcagaccccccgaccctcagccttcactcccaggagagcctccttggcctgcttttctttttttcttttacctttttctttttttttttaagtcggagttgctctgtggcccaggctggagtacagtggtgcagtcctagctcactgcagcctccacctcctgggctgaagcgatcctcccgcctcagcctcctgagtagctggaaccagaggtgtacatcaccatgtccagctaatttttttttttcagaaatggggtctcactatgttgcccacactggtctcaaactcctgggctcaagctatttatttctcccacctcaggcttttaaatcattgggattatatgaatgagccaccacatccagcatctgccagcttttcttctggaaactaaggctttggctgcaggcagtcccccattccctcccctcacgctcagtctttccattgctccacaaacactgaggacacggcgttgaggacatggcgacaccccgggcagacccgttcctgcccccctccagggcaacagggctcgggcggcccccggtggtcagggcctgcatgttggtgaccaggtgaccggctgtgtccccacagtacttccagagagtgatcccccaccagttcgacagctgcccggacaagctggtcctcaaagcctaccaggtcaagtacaaccccaagaagatgaagaggtcggtgcctgctgggcaaccagggtactggtaagaaggggggacccccgagggcatgacagtaaccacggggccctcccgatctgcaggctggagaaggagtacgcagccatgaagagcaaggagatggaggagcagatcgagatcaaagtgagtccaggggcccaggggcggggacagggatgggaggcctttgggggctgccctccgtactctaaagatcggccgctagggggcgggccttcccagcgcacaggcggacccggcggtccttggcggacaggcctccgcccacctgcgccgtccttcacctgttaggccagctgtgagcgcctcccccgcctgacgccgcggtaaccaagacagtcaaggtccctgccccgctgggccgcccagcgtcatggggaagcaatcaataaaccactgaactagagtgcggactctaaatgctctggacaaggatgtgcacgcggtgggcaaggctgacttgggcagaggctccgggcccagggtgtcgagggctaaaggcccagggcagcagcgtgccttgggggctggaggaattccaagaaggttgcagtggaggaccccgcaaggggaccgccctctggggaaagatggagcacgcagggcccagacaccagggtgtgtagggcagggtgtgggcactcacccggggcccctggttcctggggcaactggcccaccagccctgccaggtcagggggtttcctgagtgtgcaaagcttctctctccttccttgcgcattcttccctttacacgtgattttagttatttactcaacaagcatttattgccgggcgcgatggctcatgcatgtaatcccagcactttgggaggcggaggcaggtggatcacttgaggtcaggagttcgagaccagcctggctaatgcagtgaaaccccgtctctattaaaaatacaaaaattagctgggtgtggtagcacacacctgtaatcctggctactcgggaggctgaggcaggaaaatcacttgaacccgggaggcggaggttacagtgaggcaagattgtaccgttgcactccagcctgggcgacagagtgagactgtgtctcaaaaaaaaaaaaaaaagaaaagaaaagaaaaaaaacatttattgagcacctgctgtgtgccaaagtcacagctgagactgagggcgcaccagtgataggaagggacacagacacaaacccaacacagcctggctccatgctcttcaggggcagagccgcacagtggctaacactggagtccaacagacaaggattcaattccagctccagcggcacagtggctcacacctgtaatcccaacactttgagaggctgaggtgggagggtggcttgaggccaggagttggagaccagtctgggcaacatagcaataccccgtctttacaaaaatatagaaataaatacaaaaggtgtgcccagctcctgcaaggatggctgtgcttggtgctgtgatgggttgaagccagagagatgatagggaaacccaggggccagggatcagggctccagattgctatgaggaccagagacctgaaatagctctgacccagctgaactgagggactagggcaatgccctgccccactctgactcagtttccccacatgacatgcatcaatgactgtcaagtctgcggttctgtctgactgcatttgcttcctgggaatgttctaggtgtttccatcaccttttctccccagaagaaacccaggaaatattctgtgtgacctgcagtgtggcagggccctcactcacctgccaatccaaacaatttctgtaccaccttagtatcaagcaagggggcacaggtacagtcgagattcaactcgtttgcaaacctcacctgctccccagagtgtcctgggggaacctaaagtgcaaatatctttttctttttttttttttttttttggagatggagtcttgctctgtcacccaggctgcagtgcagtgaggtgatctcggcttactgcaacccctgctcccgggttcaagtgattctcctgcctcagcctcccctgtagctgggattacaggcatgcaccaccacgcctggctaatctttgtgtttttagtagaggctggtctcgaactcctgacctcaggtgatttgcctgcctcggcctcccaaagtgctgggattacaggcgtgagccactacacctggcctaaaaccgcaaatatctagccaaaatccatcagcacagaatggaaggcaggagcaagggagacgtcttcgaaaccccagccagggaacagagaaaaccactggggacaggttgctctcagcaggtcatgggaatgtagttgtcgagaaaggatgcatgatcagcacgctggacccagactcaaagaggagcctgcccccggaattgaacccgggtgcttggggcaaagcagcgaggggtgggtggtggctgctcgacagctgcttcccccactgattcccgcacaacccttggcagactgacccacgtgtgggaaggagtcttctgagggggcgtgggtactgactggcccccaaacacacacacagccacgaaggcactgacgttatttttactgaacccaggtttgttttaaaactttatttttttgtaatcaagccagtctgaacaggaattggccctgttttctgaaatcgctgacccagaacgtaagatgctggctgtgccctgcccggaaaagtggcctggccctaaggggactgaccccggcagtgggtaaatgaggggtgcatgtagacaggcgtggggggcgggctatgacgtgatctccccccacccccatagagacttcggacggagaaccggctcctgaaacagcggattgaaaccctagagaaggtgaggggcgtggccactgtgaggacatggtcgccatggggtgtgacccaccatgcggggcatggccgctaacctggggtggactcctccaagtcttctcctctctggaggactaagcagccctaccttcctgccccaggacccgacctgaacccgatttggagtgccctgcaactgggggcgactcgtatggtgattaatcctggagtgggggcgagttacaacccagtggcctgcagccacgggaatccatttgtgttctgtgccctccccggctgcacagacggggaggggtgaggaggagggagaactgccactttgatggacgagccccgtaattgggccacaagccaccccaccctgtaatttggaagtcttgccctcaaaagaaaggaaaggaaacccagtggaggagaagcgtggcgccatggtggggagccacagcccggactctgctccccaacatgctaaagatgggggtggaattgggggctcactgagccccagccccgggagcccccaattcctgctcctcactcgtcctcacttgaccctccactggccacaggaagtgggttggcagccggatttggttgccctcaccccaaagccttgttctgccttaaaattacaacgcaccccctcctctcccactctccaggaggtccgcacgaagccaaaagtccccctgccccccacagtttttccagccagcagcggcccggctgaccctggagggtgggacagtgggtttcccagccctgcggcctcccccacagccgcgggcacccccgacctccccgctcacaccgaacccctctccaggacggagctggctctagctttggtcttcctccgggtcctctcctgctggttctctggtcttccctcctctctcccccgcttctagagatagtccactgcgttagtgacaagtggttcttgtctgtctcccctctcctgtccccgcgccttccgctctgcctcctccccctgtcgctgggaacccccttcgccgggtaggagagcgctgctctggctgataggttaatccaggtactgtagctttttatcccctctccggattccttcctggccccttccctgcaccctgcacatgacagccagtaaccgcctcttccctgccattctgcgggcaggcctggcgccatgcatggagcagctggggaccgcttctgggggacacagaggcttcccgggggggcggggcatgtgaagtggggagaagggtgtgtgtggaggggctgtgagtgcgtttgggtgtgaatgtccacatgcatgtacagaaagcttcctccgggcgacacagggtggggacccaggagggctggggaacctaaaaccatattcacataaggccctggtgtgtgcagtgctgcggtcacacacacacacaacacatgcacacacacacacgcacacacacgcccggccctcacgctgctgctctctgctcctacctgcaatgcctgctaccaccttctctagctcacctgctcctgctgccacctcatcttgaatggctttatctggaagctgccacccgccacctggtggctttgagcctggaatggggggcccaagttgggtaggggacaaagatgaggtgggggaaaaaagggggtcttagctccaggcaggtggaggccccagagcccaggactagagaagatgccgctgggagaggtgaatgccctggggagcccagccctctcctgccggggcctcagctgtccccagatcctcaccctcaccggcagagtctggcatgaataggcacaggtggcctcgctgtgcccctggataaggatcccaactggggcagagactgagagccagagtggggaaggagatggagctttccaagcccagggctagctctgttcctcccgggctcctccaggtgtcctattcctgcctgtcacccacccacgtccccaggcccagtgggacgctcatcccaggctctgagtacgggaggcccccacctcacttccccccacctccactctctgggcctccccctgtggcgggaggcagggccttgggtgggagccgagggtcacggcctccccctgccccctgtcctcgctgttctcaggggcaagtgacacgggcgcaggaggcggaggagaactacgtcatcaagcgggagctggcggtggtgcggcagcagtgcagctcggcggccgaggacctgcagaaggcacagagcaccatccggcagctacaggagcagcaggtaggggcgggtgtgcggggctgctgggcggggccatgacccgcgcccccgcccccgcccaacggttttctttcagggctcataatctgccccgcctcagcacctggccctcctgttcctttctggggtaaggggaacccagagacaagcgcagattctcccccagcagctccacattctgagacatcctgatatccatttcttgccacctcatagtgtgtctgcagtatctgacttcccaacccccagcctcagcacggaggcctctgaagaccgggctgtccctgcagggtttcctctgtgtcacaggcagcagacagggctgtgactccttacggaggctcttgcctgtccccagggtctgaaggattgttaggtgtccctggggggccagccatggagaatgggagcagggcagtccgggactgtttggggagctctgagccagcagggtggggctgagggggcaccttgagtgtcttgagggccatgaactttgggtcccatgatgggcaggcccatgagtggggccccaccccaagattttcttctcctgaaagcttttagaacttaactgcgacctggtgcagtggctcacgccttaatctcagcactttgggaggctgaggcaggtggatcacctgaggttaggagttcgagaccagcctggccaacatgatgaagccccatctctaataaaaatacaaaaataagctgggtatggtggtgcgcacctgtagtcccagctactcaggaggctgaggcaggagaatcacttgaacccgggaggtggaggttgcagtgagccaagatggcaccaccgcactccagcctgggtgacagagcaagactccatctcaaaaaaaaaaaaaaaaaaaacttaactgcagctgcactcagcagttggccttcctgatcgcagggacccccagtggctgcagtcctaagccctgcaggccacagggacacatgccctggaggggccgggagcgacgctgtaggtcccgctgccatcctggcctgacccagcagggcctggcagtggggtgtaggttggagaaaccatggagtgcttgagaaagaagagccatccaatacagaggtgccccctccgcccccaggcccagagactgtggctcaagccttggcccagggattctagcggatccactgctcctggggagaaggagagcttcactgtttctcacttgtccccatgaaccacatccgtatgatgctggcgttgtggccctcagagtctgtgagcactcttgtcccaccttgctctgaggcagcatggacattagggaaactgaggctgggctcatcccacccactgcatgaggccgcctttcaggctcgttagagagactccaccagccacccctgagctccaaccttggggggatgcagagatcggggaggcccaaggccacctcctcaggcccaaagggaggccactgcaggcaagatgaggtggcccagaggagccacatggggcctggaggccatctgggccgaggcagagccaccgtcacacgtggatctcagagacccacaggaagaggatggtggctgggagggctgaggcagtcccccagagaactgtcctgccaggccacaaggtcagtgagagggagcccggctcccaccccagggaccaggtgtcctttttcaggtccaggtggcagtgtccatcactccaggggcccccactggggaacttctgagaagccagggcatggagcaagagggtgatacccacaaactctttcctcatccttccctgatttgaaatggagggtgggatgcagaggagagaggtggaaagacaggtgcacagccccaggcctctcccccaccccctgcctcgcccaccatgtggctggaacggtgaccacccagcaagaacccatctcccaccctcaccagtgatcccggaaaaccagtcactggggtcccgcggggcatccgaaggccaaggcaagtcacctttcagaatgtcccctctgtgcagcctttccaggaaggaagctggaccgggccagctgcatggatgccaggacctctaggccctgagcatcagggggtccagcccaggacaccccaagcctgggcccctctccctgctgaagggctctggggaggcggggagaagccagcaggcatggaggctgcccatcccccagccatggcctggggccccacgcagctctctgcctcccccaggagaacccccgcctcacagaagacttcgtgtcccacctggagaccgagctggagcagtcgaggctgcgggagacggagacactgggggcccttcgggagatgcaggacaaggttctcgacatggaaaaggtgcaatggggaggcagacgggcaggtgtcggggggaccctggggcacaggaggggtcctggataagctttgggagtgaccccaggtcagaatcccccacccccatgcacacacaaccatacatatgcacacacacagcacaaccccacgcggggcatgcccacgctcctgtatgaggcaaactccagcagcgtggcagcttctatgagcttcccggatacctgcatcccacctgtgtgtgtttcccccagtactgggttccaggaaggaagggaggagagagggggatgggggagggggacaggaaggagagaaaggaaggcccaggcccattgtggctgcctccctacacattcccatgcagacaccatcccagggcttctgggttcctccccaactgctctctgacttggcatcgactccactctcccacggagctcccagaggaaggaaagcacccagggacccattcacacattcagcaggagccattccccaccccctcgagcctgcactattttgggagtcctcccaaatggaggactgagaggccatctgcttccaggccctcatcaccagccaagagctgggctccgctcccgcctccctccacttcatagggaagtgtgcctccaggacatgctgctagatctgtcccagccctagacccaaacacgggtcagtgcggacctcatccagaaagctggatttgggtcctggagcacaaatcctccatcaatgagccctgggacaccaggacagggccaaggctggcactcagcctgttcccagggagagggactgcctggcctggtgtggcctggcctgggggccagagggcagacagggtgtttctgctggggcaggtcctccacctgatcatgtccctgaggggatggatctcagacctcggggagtcagtgtgtgcagcgcggcgtttatgggggttgccctaggacaccctgtgagagtaggtgctgttactacacccattttatagctgaggaactccaaccgggttccacaggcgagtccgctccccgtgggccttgtcaagggggtcgccctcccccatctgagccgcccaaggcagagctcaggaggaaacgtggctgggggcgtttgtcctgcaggaagggccatgcggctgcgctgctcccccaggccctgaccccactcttcccgcagaggaacagctcgctgcccgacgagaacaatgtggcgcagctgcaggaggagctgaaggcgctcaaggtgcgggaaggccaggcggtggcctcgacgcgagagcttaaactgcagctgcaggagctctcggacacctggcaggtgagggccgggtgggcgccggcgggcagagcgccccctagggccatcccctcggggttcttgggcggaggctgaccgccggcttctcggcttcaccccccaggcccatctggcccgcggcggccgctggaaggagtccccacggaagctggtcgtgggcgagctgcaggacgagctgatgagcgtgcgtctgcgcgaggcccaggccctggccgagggccgcgagctgcggcagcgcgtggtggaacttgagacgcaggtggactcggggggcctgctcgttggggaaggggcgtggtgtccgtggccagcccctgagttaggccctgaccgccgccgtcctccgtcctcccttcctccctatcccaggaccacatccaccgcaaccttctgaaccgcgtggaggcggagcgcgcggcgctgcaggagaagctgcagtacctggctgcacagaacaaggggctgcagacgcagctcagcgaaagccgccgcaagcaggccgaggccgagtgcaaggtgcagacccccgcggccccgccctgcccgtggcaccgcccccggacgcgcccctacatgaggccccgcccccaatccgcctctgccggcgtcctgcctcccgatctgcccctgcccgcggtcctcccgcccccgcccgcggccccgcctcctgacctgctcctgcccgcgaccccgcctcctgatccggccccgcctcctgaccacccccccccgcggtcccgcctcctgatccgcccccgcccgcggccacgcctcctgacccgcccccgcccgcacctcccttgcccgcggtcccgcccctgcccgcggtcctgcctcctgacccgcctccgcccgcggccccgcctcctcattcgcccctgcccgcggtcccgccccctgatgcgccgcgccccctgacccgccctcctttccccccaatcccccgaccccagagcaaggaggaggtgatggctgtgcgactgcgggaggcggacagcatggctgcggtggccgagatgcggcagcgcattgccgagctggagatccaggtgatcggcggggccggggtcggggggcgggggcgggggcagggcccggggcaggagcggggccggaccccaggcccagcatggcactggccccgcgtgacctggcgcaccccgcagagggaggaaggccgcatccagggccagctgaaccactcggactcatcgcagtacatccgcgagctcaaggaccagatcgaggagctgaaggccgaggtgagccggcgcggggatgccggggacaggcctgggtgtcgtcggcctgggacgagccgagcgcaggtgccttgcggaggatgcggctgggagggcggggcagaaggccggtccacgcctgcagcgccggtcccccgccccaggtgcggctgctgaagggcccgccgcccttcgaggacccgctggctttcgatgggctgagcctggcgcggcacttggacgaggactcgctgccgtcgtcggacgaggagctacttggcgtaggcgtgggcgctgccctgcaggacgcattgtaccctctgtccccgcgcgatgcgcgcttcttccgccgtctggagcggccggccaaggacagcgagggcagctcagacagcgacgccgatgagctggccgcgccctacagccagggtctggacaactgaggccatgcccagcgcgcccggagtcaggaggccgcagccgcggggggcgcccgggcagtccgcgttctgctccccacctgccgcacttgacaaactacgcgccctctgtggctcggccacccctaaagcgaggcccggcgaggcagcgcagagggtagggtccgacctgggctcctcagggccccggggcaggctctctatccccagcagtgtttacccatcttggtctgtacccctccgggccctctggcgttccaggggtgcctggaggggctgactgctctcttaacaggagggcagagggcaggggacagacgacccagaggtcccagcactgaatgagcaggcagctcccacctcctggcaggcttccttctgggacaggggcgacattgctgggaagtgctcaggaggtagccgaggcctgaggaaggagagcgccagctctgggctggacatcagcaccccacaacactcctcgggatgaagtgacccttgactagcccctggccatctctaggggagtcaggccgctggggacagatggccaggccggcctctcctgcctggcgcaggcaccgtggcccctgcagcggaaaccaaagtccccctactatgtgcggggcgcctggggactgagtggctaacgggaagcctccctgcttctctggggccagagcagcttccaggaagtgaagagacccctctccccagtgccccacatctttctctgggagacactcgcgccccctatcctggccagtgatggaggggtatctctacaggggtcctcggtctccatctacttccctttcttcatgtgtttccagccccaccctcagccagagccaggcccccaggcaggagcttcccagcgagcggcctcccctcacttcctcctggtggtcccgttgtctctgctgaatcagagctgagaacggtgccaaaatccaacgatgccccccaggccccttcctcccttcccccggccccccgggcctcatgaccctgggggctgcccccctcggtgctcccggagcctccagtagagtagcgtcacaagcaatctccctggcgcttcctgggtggggacccctgctccgtccccgcttcctagctgcccacttttcagtgttacgaagcctggggaccggggcaggcacccacggggctctccacacgccccctacactgcccgccaccattttgcacactgcctgttcacatgtcgcccaggcgggaaaaatggaaaataaagtgtatttacacagtcacggactggcctgcgggctgggaggagaatcacaagcagcggtgggtgcccagcccagggaccaaaaaccgtgctgagggaaggtggggctgtccttgcccttaggagctccccacagtctcatagaatgggggtgggagaggatagaagggcattcagtttgggggcagggcatgatttcccacctgggtgaatcaacttgggcctcccctgaaggagagaggcatgccgaatcgctgggcttcaggaagcacaggacccggttgcattcattctgctcacgcctccaggggtaatgtggggtactctgccctgtgcctggctctgagggggtctccagtggagcagaggagacaggcactgggcagggggaagcctgcactaatgtggtaggtgctcaatagacaaatgtgcagggagatcagggaaggcttcctgggggaggtggtgtcagggcctcttcgaggggtaaaagcataaagatcagaccaacaggaggcataccatacctaggaaggaagaacaggaaagcctgggcgtggtcagactaagaagggactgcttacgtcaggtgagggagtttgggctttgaactgggggccattgggagcccatggagggcttaggtaagagagccccatcagatggaccacagagtctgtgagggggccagtgcagggaggacagtgagtagggggcagaaatagtcctttgtggggttccccacagagctgaggcagagtcccagctgctgggtggcggtgggtggcggggtggaggacagagccaggagtggcaaagcaaagcttcctagaggaactcaaggcagtcgactcactgaaacgtccatctcctgggttccagtgattcccctgcctcagcctcgagagtagctgaaactgtaggcacctacgaccgtgcctggctaatttgtttcgttttgttttttgagagggagtctcactctgtcacccaggctggagtgcagtggcacgatctcggctaactgcaacctctgcctgctggtttcaagtgattctcctgcctcagcctcctgagtagctgggactaccggcgcctgccaccacatctggctaatttttttttttttagacggagtttcactcttgttgcccaggctggagtgcgatggtgcgattttggctcactgcaacctctgcctcccaggttcaagcaattctcctgcttcaccctcccaagtagctgggattacagacatgtgccaccacacctggctaattttgtattatttttagtaaagatggggtttcaccatgttggccaggatagttttgaacccctgacctcaggtgatccacccgcctcccaaagtgctgggattacaggcatgagccactgtgcccggcccaatttttgtatttttttttttaagtagagactgggtttcaccatattggccaggctggtctcaaactcctgacctcaggtgatctgccctcctcggcctcccaaagtgctgggattacaggcgggagacacggtgcgcagcccctagaggcagaaacataattgggttcaggcagatgctagccaggacctgccctctgcacccagtgtgggtccacaaagtgctccctacccccatgcctcacagccaagcaaaggacatgacactgcttgtgtactgagacagccaagtcccatgtactgtcgtatcacatgccacagctctcctggccacacatggtgcagatgtaaccctggggaccctcacagtcactgtccgtgcctcctgcttccatggtaattccacccccgctggctgcccaggtcagggcaggaccgcagaggaattgtctgaggttctgccctgtccttcccggcagctggccttgagccccagctccccagcatgtcaggagtcggccttgggcttgtcccagagtctggaaacaaagacacccaggtccccaaccccaccagggcccagcttgagaggacacctctatggtttgccacaaaactctgaccgaaggactgtgctggcgtcctcctcctccacctcccaggggtgcaggtggcagtgcccctccaggccagagcccatttctcctcagaccccaggctaggaggtgccttgtctgggatggggacaggcaggacttgctggtctgtgactgacaggaacctggtcacaggatggtgtgagggtactgggtccaggggcagaggcagggctgagggcccaaggccagatcctactctgtcttcttacccacttggggatgtcaccatcattcttggtgccatgcaggagacccgggggaggaaaggcctagcaggggagctctctgcaggggcactgggaacagggagagactggctagggtttgagaggctccagagctgggggttagggttagggttcattgggggaggaagggcaggaaactctgattggagggggcctgtgaagatgtttgggaatctgataaggacgcctgaggaaggggttagggcaaggatgccatgggggtgggatgcaccaagtggcacttgtgtaaggacacttggagacagggtgcagtgtgaggactcccccatctcccacctagacctgggagaggccacttcttcctgcaatcccctaccagggcagttggcccgggaccctgcaccagccgaagggccatgggaaggggtcccccatccttgcctcagtgccctccaatcttcccacctgttccccaggagtgctagttccccgcatcgagtttgaaaagtgtgtcaggccaggcgcggtggctcacgcctgtaatcccaggactttgggaggctgagggcagatcacctgaggtcaggagttcaagactagcctagccaacatggtgaaaccgtgtctctactaaaaatacaaaaattagccgggtgtggtggcgcgcacctgtaatcccagctactcgaaagactgaggcaggagaattgcttgaacccgggaggcagaggttgcagtgagccgagatagcactattgcactccagcctgtgcaaagagagcaaaattctgtctcaaaataataaaaaaacaggccaggcgcggtggcttatgcctgtaatcccagcgctttgggaggccaagggggttagattacgaggtcaagagatccagaccaccctggccaacatggtgaaaccctgtctctactaaaaatacaaaaattagttgggcgtggtggcatgtgcctgtagtcccaactacttgggaggctgaggcaggagaatcgcttgaacccgggaggtgaaggttgcagtgagccgagatcgcgccattgcactccagcctggcgacaaagggagactccgtcaaaaaaaaaaaaaaaaaaaaaaaaagaattagaatagaatagaaaagggttccagtcgctccttcacctcggccacgcactgactcatccactcgggcgcacagcccctgccaggcccctcctgcaccgaacgtttccaccagaagtcggataccaagaagcccaagttcacacacgtggatgggtgcgcggcaccagatggccgggactcggcatggccccgccctagccccacctggcctgccccttctctcccagaagaggaaaaccgcactttatccagagctccaaccggttcgagcacagccgccagcaaggccttatctggcctggccccccgcgccgctcagcctgctggaggcccccagccccagtcctctctgtgacagcgaaggtgtgcaagtcccagtgtcccagttttattgcaaactcaggctgtgcggggtgggcaatacactgcacacggggcgggactcggggaaacggggcgtgtcctaggccaaaggggcggagctcgaggggcgggcctaggtcaaagctgtgggtaggtcccgagcctccgaggccaaaggctcaggctctagggagctaagactaatccacccagcggggctccagggcagtggaggcggggtctaaaacaaacggcgtacccggaggggcggatcctaaggcaggggtggggtgtagcaggcggggctgtggtctggctcagtggaaggtctccacctccaccacggtccagtcaccctgcggggaggccacgtcgtccggagagaagctggtgaccgaggtgatgctggcacgggactcgtccaggggagacagtagttcggcccagcggccgagttcggcgtcgctgagtgcagcccgggcgccccctgtgacgccaccaccctccgcacctcctgggcccccgccgctgccgcccgcggcaccctcggcagccgccagcagcagcgtccggctcagcaggtgctgcacgacgctcgcctgcagcgcccccagtggcagctcgcccaggcgcgcctgcttcgggctccgcgaggacgccccggccccggccccagccgccgccttcccaccgctcgtgccgggactgggccccggatccagtgcgccaggggcgggggtcgccgactcgggcccttcagtctcgtagatggtgcacagaccgtcagcagagcccggtccggtagcgggaggccacggcaggggcgcacctgcggggagagacgccaggtgggccgtgggggtgataagccccgcccctgcctcaaggtcccgcctccttgtctaagctccgccccggacccagctgtcccgcccctgagctgcgaagcctcgcctccgaccccgcccacagccaggccgggtctggggtgccccttacctggggctccgcggaaagccagcggcggagcggggcctcgactccaggcagccgggtggcaagcggcgagctctgcgtcggggggcggggaggctgcggcaccgccctcgggcccgctgtcgtagccacgcagctcctctggcgtgctcgtggcgctgctgctgtggccggccaggtctgggccgctcagcgtgctggacgggctgcgcgagggcggcggcggcgggccgggggccaacgccagggtcagccgtgggcccgagacggaggtatccggacccggggtcggggggcggcgtggggcctgcagggtgggtgaggcagggggagagggagggacctgcagaaggggcgctgccagaacaggtggggcctgtggaggaggcgtggccaaaggagacattgggagtgaggcagagggtgagaaaggggcctgcccagggaatgaggcaggcggagagggaagggcctgcagaggaggtgtggccagagcaggtggggcctgtggagggggcttagccaaaggagacattgggagtgaggcagggggagagggcgggacctgcagaggaggagcggcaagaaggggtgggacccgtggagggggcgtggccgaaggagacattgggggagaggcagggggagagggtgggacctgcagaggaggcgcagcgagagggggtggggcctgtggagggggcgtggctgaaggagacattgggggagaggcagggggagagggtgggacctgcagaggaggtgcggctagagagggtggggcctgtgaagggggcgtggccgaaggagacactgggggtgaggcagggggagagaaaggggcctgcactgggggtgagggagggggagagaaaggggcctgcagaaggtgcactgccagagcatttggggcctgtggagagggtgtggccaaaggagacagagggggtgaggcagggggagagggaggggcctgcagaggaggcaaggccagggcaggtggggcctgtggagggggcgtggccaaaggagacagagggggagagggcaggccctgcaaagggggtgaggccagagcaggtggggcctgtggaggaggcgtggctatggaagagggcgtctccggagggggcgtggtcaatggcgaaggtggtgcttgcagagggcatggggctggacaaggtggagtctccagatggggtgtggtcaggggagcagaagctgtctgcagaggaggcggggctagagaaggtaggttctccagagggggtgtggtcaggggagcagaagctgtctgcagaggaggcggggctagagaaggtaggttctccagagggggtgtggtcagggaagcaggaggtgtctgcagagagggtggggctagggaagattgggtctccagagggggcatgatcagggaagagagaggtgcctgaggagagtgggaggccagagaagatagcgcctgcagagggtgtatggtcaggggtgagcttaggggtgagacagcaggagagagagaagtctgcagagggggtgaggcaggaagggaaagaggggcctgcagagggggtgaatcagggggagtagaggccggccgagaaggtgagatcaaagaagcttgggtttgcctaggggacattgtcaggaaagaatgtgtggcctgcagagtgggtgagcccaaagaagttgtggcctgcagagaggacaaagccagaggagagggaggtgcctgcagagacggtgaggtcagagaatgtgggacctgtattgggggaatggtctggagagagggcggggcctgcatagggggcgtagtcatagaaggtggggcctgtgggtggggcggagcctgcagaggcggtgaggccaaaagagagggagaaactagaggaggatcctgcagagagactgtggtcaaaggagagggagaggcctgcagaggcaatgtggccagaagaggagagtcctgcagaggaagagtggccagagtgtggggcgtggcctggagagagggcggagacggggaaggactggcctgcggagggggcgtggtcagagcagaaaggcctggctgagggagtgcggccaggggaaaagccgaattccccagagatgttgccggagaaacagggccttgtagaggagacatggctgacagaggaggtgtggccaagggagagaggagagtcggaagagagggcaacgctggattagcttgggtggggggcatactctgcagaggggatgaaactgatggagagactgaagccacaaaagcggctgtggccagggaagagacgcctgcttctggaaaggacataatcagctgtgtgggtggaacttgcgaggggggcgtggctggtggagaggggagggtctgcagagaaggtggagcagagggagaaggaggggctagaggaaggggcgtggccaactgacaggtaaggctcgacgagtggggcgtggccggcagggtgggcggggcctgactttggagagcggctggcggagggggcgttaccggtggagagggagggagcgtggctggcaggggagtggctgcattgtcgggaggcggtacgggtcttgccttggtacccgatggagagggtgtggccaaaggagaggaagaaagcggtcctagtgctggggctgcgtccttccttgggggtgtgacctgagggggtcgcagagcctgcagtcctttcggcttgggctgcgagggatgcgcaggagccctgggtgttccgcgggctgagggcccagaacgggctggggaggagagaggggtggcgctggagctcagggagcgcgaggccggcctctggagacccccaccggcgctgggccgcctcctggcagccgggcttggctcggtggtactgtgctccgaggcgctgctcactgatttccgggggccctctgtcgggggccgtggccgggcactcggagctggccgggggagccccacctcggtgcccgcagcccgggaccgacgggccatggccggggacggggttcctggggtaggcccggaagtgtctggagaaaaagtagaaggccaagggtcaccgatacctctgaggcggctccccttgctgcccaggaaccccactcttctccaggtcacgtacctctccgtgccccagcgctgagggcactccttttgggagcctctgtagcttttcctctggccacagtttcctccgctgagatccggagtcccttctggccaagagggcctggcctggagacagaaggggccacgctcaggcctaggtctttgtttggcttcccaagtctctattttcccatctgtgaaatgggcatgtgccctctctgaggaccaataatggctttcacccaatttgtgcccagtgacctgcaagtgctcccgcgccccaactcgtgtaaaataaaaggttccagactctgtgacgctaaccctggcttaggagactgggggagagggagcaggttacctggtggtcccgctggcacgccctgggctagaaacagggcctgggctggtgttcttggcaggaggagctctctcccctctcccagaggctgggggcctggaggctgcggggagaaggccgagtcacaggtgccccggagaggtggcagtggaggtgagactggacaggtattggaagggggagggaagatgggggcggagctgaggaaggaggctggggtaccagggtttcgggaacttgtcccagcactccgcgttggtcccgctcggggagcagactcgggaatagtggccccgccgatgccccccgctcgctctgccagaggctttcgccccactgctcccgcagctcccagaactcggagggctgcgggagttactgggggagggggtcgaggagagcctgggggcctgggggtcagaagtccaggagcgcgagcagccggcgtccgcgcggcggcccctgccttcgccttgtctctcttgttgtccatcttgcacctgaagagacaaaccggtccgcatcccaggttctggacagctacgccgcctccagagacctggaccctgctacctcactgccctttcgcagcatcgccacccatggacactcaaacctcggcctcggcttccatccgctcggctcccacgcacctacacccactcgccagccccactgctcctcgctgtccccaagtcccaccccccaccgcttttccctaaagcgaagaggccctgcccgccccagcccaccgcctcccccgcctcggctccaattcaggaccgatctccacgcccctgccccttgccccttcagggactcagaccgccagcctcgagagcgggggactgccacgggctcaggatgtcgcatccctccagacccggagcgcacgcccgggtctccccgccagcccccatcggcctcccctggcctccccgagggatgcctgcacctgccgggaggcagagcggccccgctgcccgcgaacgggctccgggagacaaagagccgcgtcccgggcccgacccctcccccagccgggcctggcccgcgcccagcctctccacctgctcgcgtcgcgctcacctccgcctccggcctccggccgctcctcacagagtcgcctggggtggggcccgggccggagcgacgcggtggccgccagcggcgaggaggcgaggggagggggctgcgggctgcggcgccgggggagccgagccggtcccgcccctcggccgcgggcgggagagccgggggcgcgcgctcgatccggacccgggagcgcggccggcggaagcgcgccgagggggatgggggagaagcgcgctttggagagaagggtggcttctctgcggtccgggggaagcctgtttccccagctgcgcctgaggaacccagatagtcaacggttgggactgggggagcaaatccctggggtcctccactgtccttcccaacacatacacctgccccgacccccaccacaaccacctggcaccaaggaccgcctggacgcggataggctgggccctggcaaccaggaggcgggaccaccgcgcctctggcccacacaccaatccggccgctcggtggccctggcactatccagtccttcgcgtctgcgaaagctaggccgcccagggtctctggggggcagccgccctccgccccacacccgaaggtgttccccagacgccaggaaaccccttatctggttggggggtcgagggactgctaagagaatgctgccctgggaatttcaggatgcaaggtagaccccagattttggggaagataaagaaaggaataggagggagagcgacaggagacacagtatattctgtgagaggtgacccagccgtctgcagggtagagcacgcccaccctccacaccctcccagctaacgggatgtcaagtcagcccagacttcctggcagagctgggcttccgggggacaaggttctgtcgacctagcaggtgtcaaaacaagtgcataaggccgggcgcggtggctcacacctgtaatcccactgctttgggaggctgaggcgggcggatcacttgagctcaggagttcgagaccagtctggccaacatggcgaaaccctgtctctaccaaaaaatacaaaaattagccgggcatgctggcgagcacctgtaatcccagctactcgagaggctgaggcaggagaatcgcttgaacccgggaggcggaggttacagtgagccgagattgcgccactgcacttcagcctgggcgacagagtgagactctgtctcaaaaacaaaaacaaacaaaaaaacaaaaacacaagttcatgaaggacgcagaagatcctttacaagggtcccagcccagccggagcgagtgggaggtgtcctgttgctgacttcagccagggcaggggcctcggtggagagcggtgctccaggactgtggcatgaagagggtgggagcctgagggtggaaatggccattcctcagctccctctccttataagaagagtctgggccgggcatggtggctcaggcctgtaatcccagtactttgggaggccgaggtgggcggatcacaaagtcaggagatcgagaccatcctggctaacacggtgaaaccttgtctctactaaaaatacaaaaaattaaacgggcgtggtggtgggcgcctgtagtcccagctactcgggaggctgagtatggcctgagtatggctgagaatggcgtgaacccaggaggcagagcttgcagtgagccgaaatcgtgccactgtattccagcctgggcgacagtgcaagactctgtcacacatgcacaaaaaaagagtctggccttgtcacctctgtcggccaagtcccctcctcatatggcctccatgagctttccgcctggatgtcgcatccctccagacttacagccactttttaccccattccaggaaaccagcgccctgtgccccactgctaaccccatcgcaagctcatatgcacagttcactccctcctggaaatcagggggcctccatgcacaggaaacagataatgcaacttggcatcgggtgaactggggttggggggtagggacgttgcgcccatttgaggttgcagaaatggaaggcagagaaaaatgacagagctgaatgccatgctttgacctccagattggatcatcctaggccttatcttctccctcagtctagcaatgatcacccgtgtgaaccccttgtggcatgacaccagcctggttccctgtctacccacccacacccagtgcctccttccaaatcacatccaccaacacagatccctgccctcctatttatttatttttgagacaggatctcactctgtcacccaggctgaagtgcagtggcacgatcatcacagcttcacagctcactgcagcctcgacctcccaggctccagtgatcctcccacctcagcctcccaagtagctgggactatcagccgaggcgggtggataatttgaagacaagagttcaagaccagcctagtcaacagggtgaaactctgtctctactaaaaatacaaaaaaattagctgggtgtggtgcctatagtcccagctacttggaaggctgaggcgcgagaatcgcttgaacccaggaggcggaagttgcagtgagccgagatcatgccactgcactccagcctgggtgacagagagactccatctcaaaataataaaaaataaaaaataaaaataaaaaacaaaacccagatcacttgaggtcaggagttcgagaccagcctggccaacatggtgaaacctcatctctactaaaaatacacaaattagccgggcatggtggccatgcacctgtaatcccaactactcgggaggctgaggtaggagaatcgcttgaacctgggaggcagagggtgcagtgagccgagatcacgccattgcattccagcctgggcgacagagcaagactccatctcaaaaaaacaaacaaaaacaaaaacaacaacaaaaaaacaagtagctgggactaaagcctaccccaccatatcaggctaatttttaaattttttgtagaaacagagtctcgctgttacccaggctggtcttgaactcctgggctcaagtgattctcccacctcagcctccaaaactgctgggattacaggcaggagccacctcactcagcttcacctgccttctgactatgatgcaagggttcctccagggtacacaaaacccaccctgtaattaattgggatctggactctgccctcttataaaaacactcccaaaacctccatcaacaagagggatgagtaacatgaatcaaagtgtcccctacaatggaatgaaacttggcaacagaaaggaacagactatgctactctcaaaacagggactaatctcaaaagcacaccgaacaaaagaagctacaaaaaacacgcactgtatgattccatttatagaacattccagaaaatgcgactaatctgtagttacagacagcacatcagtggttgcttggaacaggtgggggagggacattgaatgaactgcccagcgtagccactcttaggcatgtgactctcaggtgagggccaggcgactgtagtcccagctactggggaggctaagacaggaggatccccttgaggccgggagtttgaggccagctagggaaatataaggagaccccgtctctaaaagaaaaataaataaatcacaaatatatatgtatatgtgtgtgtgtatatatatacatatatacatatatatacatatatacatatatacgtatatacgcatatatacatatatacatatatacgtatatacgcatatatacatatatacatatatacgtatatacgcatatatacatatatacatatatacgtatatacgcatatatacatatatacatatatacgtgtatacgcatatatacatatatacatatatacgtgtatacgcatatatacatatatacgtgtatacgcatatatacatatatatacatatatacatatatatatatattttttttttgagacagagtctcactctgtcacccaggctggagtgcaatggcgtgatcttggccctaatttttaattaattaatttatttttgaggcggagtttcactcttgttgcccaggctggagtgcaatggtgcgatatcagctcaccgcaacctctgcctcccaggttcaagcgattctcctgcctcagcctcctgagtagctgggattacaggcatgcgccaccatgcccggctaattttgtagttttagtagggatggggtttctccatgttggtcaggatggtctcgaactcctgacttcaggtgatccacccacctcggcctcccaaagtgctgggattacaggcgtgagccactgcacctgggcatatatatatatatatatatttttttttttttttgaggaagcaatttctttaattttatcagaatccaggacacaacaagaaaagcacccaaaaaccacatggagacagaagatgagacacaactcctcccccaccccttccctgctctagagtggggacaaagtcagagtgagacagcttgggggagacctgaacctcagtccagccctacaggctccaggcctgcagggaaggagggtaatggggaggcagggcccagccccccagtttggggaaacagctgagggaaggcccccctcaaaaggctccacctcctcaccagcactcctgcccagggacagggagcccacagcagcaaggggacctcagggccatggccaccttcatgactgagaagtagctgagtggaggcaggagacacacgattatctgggcagaatcagttagagcaggggcctggaagggccccatgggccaaaccctgaggtcacaggaggggccccaaagcggggctagtgagtgaggtcctgagtgagtgggtcagcagctgggcccctttctctagcttcctgtagcccctccaatactgctgccagggaggcctgcctccagggaaatgggataagaaagcagcctgcccctgctgcagacagagccaggtggctgaggccaggaaggaaagcccggccaggccttgccacctgccccagaggcctgtgggaaaaggacaggccaggaagggtggggacaggggctcgactggctcagatccaagatggtgccacgcttgcttgctgagtcccccatgagctggggcaccgcactggggccagcgactagttagacagaaggcagcaacttctccaagaaattccttcacagctgccatctcctgaggacagcagctgtgcatgacacccgagtatgtcttgaactggaccctggcaggtgtgacaacagccgtcagggtcccaaaccgtacgggcaccatggggtccagctccccatggcactggaggatggtcaggcccttgccactgcctttagctgcctgggggaaggcccggtgcagaggcagccagcagctcgatgctacgataccagccagcgggtgggggcaggtgagggccgtgtagagggacagggccccgccctgtgaaaagcctcccaggacgattcgattggcagggatcccgttcttcatttcatgctcaatcaaggccttgatgttctctgctgccttcttgatgccagcctcgtcctctggggcatctggactcagccccatcaggtcaaatcaggaaggtgtcaccatcttcatgttgagagtcacagggatcctaggcacatggggacagatggaattgacgtgagggagccggacggtggagagggcgtcagcccagctgtgccctgtgtctccaagtccatataaaaaactaaccgcggctgtttcccgctcagctccagacaccgcggcagcatcagtgagaggggcgtagacgtggtgttaccacacatacaccacatggctccacggcgggagcctccactccctggggcttccgaggccgcttgggcgattctcctctttctcccgcagacacacactcttccccctcggccacccccactccatatatatatatgtatatataaatatattatatatataaatataaaaaaatatataaatatattatatataaatataaaatatacatataaatatattatctataaatataatatatataaatatattatctataaatataaaatatatataaatatattatctataaatataaaatatatataaatatatttatatatatataatatattatatatatataatatattatatatatataaatatattatatatataaatataaaatatatataaatatattatatatataaatataaaatatatataaatatattatatataaatataaaatatatataaatatattatatataaatataaaatatatataaatatattatatataaatataaaatatatataaatatatataaatataaaatatatataaatatacatatattttttttttgagactgagtctcgctctatcacccagtctggagtgcagtggcgcgatctcggctcactgcaagctgcttcccaggttcacgccattctcctgcctcagcctcctgagtagctgggactacaggcgcccgccaccatgcccggctaattttttgtatttttagtagagatggggtttcaccgttttagccaggatggtctcgatctcctgaccttgtgacccacccacctcagcctcccaaagtgctgggattacaggcgtgagccaccgcgcccagctatatatatattttaaacagtgaggggctgttttgttttgttttgttttttggttttgtttgttcgtttgtttgtttggatggagtcctgctctgttgcccaggctggagtgcagtggtttgatctcagctcactgcaacctccacctcctgggttcaagtgattctcctgcctcagcctcctgagtagctgggattacaggtgcccaccatcacgcccggctaattttttgtatttttagtagagacaagttttcaccctgttggccaggctggtcttgaactcctgacctcacgtaatccacccgcctcagcctcccaaagtgttggtattacaggcgtgagccaccgcgcccagcccctaattttgtatttttagtagagacggggtttcgccatgttggccaggctggtcttgaactcctggcctcaagtgatccacccaccttgacctcccaaagtgctgggattacaggcgtgagccactgcagcccagccaatacatacttttttaaagctagtaaatttttgggtaatttgttacaaagtaatagctaactcacattccaaaatcttagaagctggatagtaaataacaagtactgaggggcgatgtggagaaattggaacacaggtgtcctgttgatgggaatgtaaactggtacagctaaacccagtgcagtagctcatgcttgtaatcccagcacttagggaggctgaggcaggccgatcacttgagctcaggagttcaagaccagcctggccaacatgacaaaaccccgtctctactaaaaatagaaaaattagctaggcgtggtggtgcatgcctgtaatcccagctacttgggaggctgaggcaggagaatcacttgaacccgggaggcggaggttgcaatgagccgagatcacaccactgcactccagccagggcgacagagtaagattccatctcaaaaaaaaaaaaaagaaagaaagaaaagaaagaaatatttgtaccctcgtgttcatagcagtagtattcgcaagaaccaaaaggtggaagcaacccccaagtgtccaccagcagaggggtaaatagataaaatgtggttcatccatgcaatggaatattatgcagccctgaaaaggcagaaaattctgatgcatgctgtgacatcgatgaaccatgaggacatcatgctcaggggaataagccagacacaaaaggacaaatcctgtgtgattccacttgtaggaggtccctagaggagtcagattcatgggagacagaaagtagaatggtgggtgccagcagctatgggagggaggtggggagttagtgtttcatggggacagagtttcaatttgagaagatgagaaagttcgggagatggatgttggtgatggttgtacaaccatgtgaatatgcttaatgccacggaggtgcacacttagaaatggttacaatggctgggcacagtggctcatgcgtgtaatcccagcactttgggaggctaaggccagaggatcgtccgagaccagaagttcaggaccagcctgggcaatatatcaagaccccgtctctacaaaaaaaaaaaaaaaatctaaaaaatagctgggtgcggtggcacacacctgtagtcccagctacttgggaggctgaagtggggaggatcacctgagcccaagggttcgaggctacagtgagctatgatgaaaccattgcacaccagtctgggtgacagagcaagacctcatctccaaaattaaaaaaaaattaaactggccaattttatattatattggaccaaaatttaaatttttttcttttttccttttaatttcaggagaaaccttaaaagccaattgaaaaaatatgtcttctttcttagagacgatgcctcactctgttgctcaggaaggagtacaatggtgcaatagtagctcactgtagcctcaacttcctgggcttaagcatttctcccacctcagtctcccaaatagctggaaccacaggcatgcgccactgtgcccggctacttttttttttttttttttttttgtagagacggggtctcaggtctcactgttgcccaggctggtctcaaacccctgggctcaagcgatcctcctgcctcagcctcccaaagtgctgggattacacgcatgagccaccgtgactgacccatattttttttaagctagatattatcatgtggaaagactcacacagtagcaatgggaatgtaaagtgggcagcctttctgataaataattggaaaggattgagtattggtgtgctatgactcagccatcccactcagcatctatacctgcagcaggtgcatctatacctgcggcaggtgcatctatacctgcggcaggtgcatctatatctacagcaggtaccataccaccctgtctatatccctgagcactcacagtccctgtgggcagggaactcagaagtgccagagagttaacacctctccacctcccttctctggagcaacccttaggcagggacagacaggagctggtggagaaatacttcaatttcctcgaccctgtaatcccagctactcaggaggctgaggcaggagaatggcttgaacccgggaggcggaggttgcagtgagctaacaccactgcactccagcctgggcaacagagctagactctgtctcaaaaaataaaataaaaaagatgctaggccgggcgcggtggctcacacctgtaatcccagcactttgggaggccgaggcaggcggatcacctgaggtcaggagtttgagaccagcccggccaacatggcaaaaccccatctctactaaaaatacaaaaattagccaggtgtggtggcacgtgcctgtaatcccagctactcagcaggctgggagactcacttgaacccagtgaggttgcagtgagctgagattgcaccactgcacttcagcctgggagacagagtgagactccatctctcaaaaaaaaaaaaaaaaaagcttatttcagcatgtggttgcaaacatccccagggcacagatcccaagaaacctctcagaagacaggaagtaggccaggcatggtgcctcatgcctgtaaccccagcactttgggaggccaagacggtaggatctgcttgggcccaggagtttcagaccagcctgggcaacatagtaagactctgtctctataaaataaataaataaataaataaataaataattcagcagatgtggtggtgcatgcctgtggacctagctacttgggagggagggtgaggcaggaggatcacctgagcccaggagttcaaggctgcagtgagctaggatcatgccactgcatgccagcctgggcaacagagggagaaaaaaaagaagaatgaagaaggaggaggaggaaaggagaaggagaagaaggaggaggagaacagaaagtggaggaggagaaggaggggaaagagggaggaggaggaggggcaaagaaaaaggaaaggaaagaaagaaaagaaaggaaggaaggaaggaaggagagaggagggggaggaggagggggaggagaaggaaggcaaggaggaggagagggaggaggagggggagggggaggagggggaggaggaagatgggagggggagggggaggagagggaggaggaagatggggagggggaggggaggaagggggaggagagggaggaggaagatggggagggggagaggaggaggggggaggagagggaggaggaagatggggagggggaggggaggagggggagggggagggggaggaggaggaggagaaggcgaaggcgaaggcctagtgcagtgactcacacctgtaatcacaacactttgggaggctgaggcaggagttcaacaccagcctggccagcatggcaaaaccctgtctctactaaaaatacaaaaattagccaggcacagtggtgggcgcctgtaatcccagccactctggaggctgagttaggaaaattgcttgaacccaggaggcgaaggttgcagtgagcccagatcgtgccattgcactgcagcctgggcaaggactccatctcaaaaaaataaagaaagaaaaagaaggccaggtgcgatggctcacgcctgtaatcccagcactttgggaggccgagacaggcagatcacctgaggtcgggagttcgagaccagcctgaccaacgtggagaaactccatctctaccaaaaatacaaaattagccgagtggtggcgcatgcctgtaatcccagctactcgggaggctgaggctgggaattgcttgaaccccggaggcggaggttgcggtgagcagcgatcacgccattgcactccggcctgggcaacaacagcaaaactccatgaaacaaagaaggaaagaaagaagaaaggaaggaaggaaagaaggaaggaaggaaggaaggaagacaggaagagtcactccaaaggagagacaacctttctcacaggtcccttcctcaaagcggtcttcaaggaaccccttgtcccttgctaccgcttcaccttgctttgttatatatacaacatttgtcacaaactggcattaccttgttcttccgtttgtcttttgttttgttttgtttttaaaagccaggttctgagctgccacccaggctggagtgcagtggtgcaatcatggctcactgtagcctccaactcccaggctcaagtgatcctcctgtctcagcctctcaagtagctgggaccacaggtgcacaccatcacacccagctcatttttatttacttatttatttatttttgagacggagtctcactctgttgcccaggctggagtgcagtggtgcaatctcggctcaccacaacctccgcctcctgggttcaatcgattctcctccctcagcctcccgagtagctgggattacaggtgcgtgccactacgcctgactaattcttctatcatttttatttattttttgtagagatgggatctcactatgttgctcaggctgatctcagactcctgggctcaagcgatccacccaccttggtcagcctcctaaactgctgggatttaaggcgtgagccaccccacctggtctcctttattagtttacttagtgtatctctcccacccactaggacagaagctctcagagagtagagagccttgctggtcttgtcctgcaaggaagctgcagatgccgacagacaacaggtgctcttaaagctctactaaatccaaaaggaagttttgtctttggactccctgtggcggtgcccagaaggtccctgacttacaagtttccaaccctagaggtttccagtcgcaggcccagacctggtcaatgtcagggcttttttttttttcttttttcttttgagacggagttttgctcttgttgcccaggctggagggcagtggcacgatctcggctcacggcaacatccgcctcctgggttcaagcgattctcctgcctcagcctcccaagtagctgggattacaggcttgtgccaccacacccagctaatgttttgtatttttagtagagatggggtttcaccatgttggccaggctggactcgaactcctgacctcaggtgaatcacccgagtcggcctcccaaagtgctgagattctaggcatgagccaccgcgcccggccaagtcaaggcttcttttaccctgtcagggagaactctccgtctcccatcctaagtccaggtaggaacatttccatggatggtttggttttgttttgttttgttttgagatggaatcctgttctgtcgcccaggctggagtggggtggtgcaatctcagttcactgtaacctccacctcccaggctcaagcgattctcttgtctcagcctcccaagtagcacaagccaccacacccagctaatttttgtatttttagtagagacagggtttcaccatgttggccaggctggtctcaaacgcctgacctcaggtgatccaccctcctcagcctccgaaagtgctagattacaggtgtaagccactgtgaccagcccaagcctacagcacccggtattcctaggtggtctcccatccaagtactaaccaggtccgacactgcttagcttgcgaggtgagacgaggatcagatgcttttagggtggtatggccatagatacatccaaggtttttcttttcttttctttttttatctttttttttttttttttttttgagatggagtctcactcttcgcccaggctggagtgcagtggcgcaatctcggctcactgcaagctctgcctcctgggttcacgccattctcctgcctcagcctcctgagtagctgggactacaggcgcccgccaccacgccctgctaatttttttgtatttttgtagagactgtgtttcactgtgttagccacgatggtctcgatctcctgacctcgtgatccacccgcctcagcctcccaaagagctgggattacaggcgtgagccactgcacccggcctccaaggtttttcagacggagaacagatcaaggtccacctccacagatttgctcatctaagacccagctcaggcctcccaagtggggcggccagggtgggggtggggaggcagagaagctgggccccccaggacttcggagctgcttgtgccccactccccacctggagggcagaccacagtgttgggcagggacagacaggagggcatccccactctactcaacttccgttggttcagcccagttcccgcccatggccagagcttgaagggagaagccgtcccctccccgtcctctcctcccgcaactccactcccagcacctgaaaactgcagtcacctgtgccttggctgggctttaaggccaggtgactgggccttgcggggttagaaggagcccttccgcacttcctctttttcttttttttcttttggagacagggtccttcttggtggcccaggctggagtgcagtggcatgatcgtagctcgctgcagcctctcaacttcccagattcaggtgatccttccacctcggcctccagagtagctgggactacaggcacacaccaccacacctggctaatttttaaaattttgtttttgtaggttttaaaattttttgtagagatgtggtcccactatattgctcaggctggtttcaaactcctaggcccaaggtatcctcctgcctcggcctcccaaagtgttggattacaggcgtgagtcacagagcccggcctccacattttctcgacagggtccgtaagacctggttcccagaaaggtggccgtagaatggctttgggagttcagcgtccccagctccctcagtttccccagctgccagggtccagccagactgcaaagttgcaaagttctaagacccctgcatctcccgccagccccgagcccaccagggcaaagcagcctaagacggctgtcttcccccaaccctgctgatcgcgcggcgcctggagtagggtcgacctgggcgcgcctgcggcgaggcggggccgagtcgtccgggggcggggcggggcggctccgggtctcctgtccccgcctgccctgactcaccctcgcggcccgcccgggaactctgcgggagtcgcggcagctccgctcccagagacccaggagttgggcccagcgtccctcccggaacggtgagtaggtggctctttgcctctggacaccccacgaggtggcagggtgggggtcgggctgggagtccccgggtctggacaaggggcagagccgctccaggtgcgccggccctgtggccggggcaggccgtcccgacacaccaggagctggggtgggggtgccggccggtgcaaagggaaacctggcccacgaggtgcccgtcctgggagccaggcagacgcggccaagtctcagagtgaagataaacaggctgaagataaacttgactttgggggtctcaaccactttcccctccccttggcatctgggaagacattgacaactcatccccgggagactctcagagctccagaacctaccacttggggtgggttcaaccaagcctgacctctggtgctcttgaacttacacatgtcccagatcttcaagtctgctggcagaggcggcttggaaaaccactcggctgggaatccgcaggcctggggcctgacccaggacgggctacaaagatgccaccctcccccaccctagaccctcagtttctcccttgcataaatggttgaggctcagccggacaccgtgccttacgtctataatcccagcactttgggaggccgaggtgggcaggtcacctgaggtcaggtgtttgagaccagcctggctaacacggtgaaaccccatctctactaaaaatacaaaaattagtggcgtgtccctgtagtcccagctactggggaggctgaggcttgagtactgctcggacccaagaggtggaggttgcagtgagttgagattgggccactgcactccagcctgggcaacagagcgacactccatctcaaaaaaaaaaaaagattgaggccaggcacagtggctcacacctgtaatcccagcactttgggaggctgaggtgggaggattgcttggactcagaagttcaagaccagcctgggcaacatagcgagactccatctctacaaaaaatctaaaagttggctgggcatggtagcacgcacctgtggtcccagctactggggaggctgaggcaggaggatcacttgagcccaggagttcgagactactatgagctatgatcgtgccactgaactccagcctgggtgacagagcaagactctatctctctctctctctctttttttttttttcaagatagagtcttgctctgttgccaggccggagcgcagtggcacgatcttggctcacggcaacctccacctcccaggttcaagcgattctcctgcctcagcctcctgagtagctgggactacaagcatgtggcaccatacccagctaatctttgtatttttagagatggggtttcatcatgttggccaggatggtcttgatctcttgacctcgtgatccacctgcctcaacctctcaaagtgctgggattacaggcgtgatccactgtgtccgtcaggactctatgtctaaaaaaaaaaaaaggttgggccttgttttctacaaaacccctcttagggctgaaaactgctggatgtttcttgcttcttccctgcctcttagcatgggctgtgggtgtggagggtctcactctcccacccttcccccagcaggaactcatcaccacattttttggaggcaagtggcttgaggaggacctgggagggaggaggggtgaggcatgggtggatggagccagggctggtgggagccacatggtctcaggctggaaagccttccagcctggcctgccacaatgcaacaccgctcttaggtgcttttggcaaagatgctgtggtttttttgttgttgtttgttttttgagatagagtcttgctctgttgcccaggctggattgcagtggcgcaatcacggctcactgcaacttccacctcctgggttcaagagattctcctgcttcagccgggcacggtggcgcacgcctgtaatcccagctctttgggaggccgaggcaggcagatcatgagatcaggagattgagaccatcctggctaatacagtgaaaccccgtctctactaaaattacaaaaaattagccgggcgaggtggcgggcgcctgtagtcccagctactcgggaggctgaagcaggagaatggtgtgaacccgggaggcggagcttgcagtgagccgagatcacaccactgcactccagcctgggcgacagagtgagactctgtctcaaaaaaaaaagagattctcctgcttcagcttccccattagctgggattataggtgcccaccaccactccagctaattttgtatttttagtagacatggggttttaccatgttgggctagcctggtctcaaactcctgacctcaaatgatctgcctaccttggcctcccaaagtgttgggattacaggcgtgagccaccgtgcctggcaagatgctgcattttaattagaggctgtctcccaagagggaacagagcagttgcaatcctacaggcaggacctggaggttggatgggtcaggcttcgaatgccgcttggaactgtagaagcttgagcaagttatttctctcccctgagtctggaaagcaaagtctccgacatccacgctgcctgggttgggataaaatgaggcattcagtgtctggtggagaaagctgagcgtatacgtcccatcgttttattttccctggctctgccccaattcttcgagcccctgttcctggaccttcccaccagccctgctcagacaaagtgggggcctattttatgtctgtggaaatttaatggcaggtttgtgaggatcaagtttgagtcatggagacagataatgatagcccctgtggctgccccccggtcccctgagtgttgctgccttcttgtctgcgattgtgcacctgggatggctattggtggagcttacaccagggtggcaaggacaggaagttggtccctgctcgggtgtgtgtgtgtgtgtgtgtgtttgtgtgtgtgtgtgtgtgttgtgtgatttcttctgcagcctccagagtcaggagtttttgttttgttttgtttttttgagacggagtctcgctctgtcgcccaggctggagtgcagtggcgagatcttggctcactgcagcttctgtctcccgagtttaagcaattctcctgcctcactctcctgagtagctgggattacaggcatccaccaccatgcctggctaattgtttttgtatttttagtagagacgaggtttcaccatgttggccaggctggtctggaactcctgacctcaaattatccgcctaccttggcctcccaaagtgctgggattacaggcgagagccaccgcgcccggccccagtcagtagtgttttgcttgctgtgtttgagatagggtcttgcccaggctggttcatggctcactgcagcctctaactcctgggttcaagcaatcctcccacctcagtcttccaagtagctgggactacaggcatgcaccaccacacctggcaagattttagattttttttttttttttgagacggagtctcgctctgtcgcccaggctggagtacagttgtgcaatcttggctcactgcaggctctgcctcccaggttcacgccattctcctgcctcagcctcccaagtagctgggactacaggcgtctgccactatgcccggctaattttttgtatttttagtagagacggggtttcgccgcattagccaggatggtctcaatctcctgacctcgtgatccacccacctcggcctcccaaagtgctgggattacaggcgtgagccaccgcacccggcccaaatttttagatttttttgtagaaatggggtctgactatgttgtcctggctgctcaaactcctgggctcaagcaatcctcctgcctcagcctcccaaagtgctggaattacaggcctgagccactgcacccagcctggggtcagcattcttaggtaaagcaactgagcagtgtccctgcaggatccttggaggactcaatggatggccggaaccaaaacaggacgtgagggtccctggtgctgggtccctccgaagctcagtgtgtgtacttggactttataccctcgtgcacaaatatgcatgacccaaaatgaccccaagcgtccattttggtgggtgcaatgtacatattcttcccctggggacagttgagctatcctggtatgtttctaccagattacatactggtgacccaggcagactgggatatttgtagtcgggtttcttttctcttctcttctcttttttagagacagggtcttgctctgtcgcccaggctggaatgcagtagtgcaatcttggctgactgcaacctccgcctcccgggttcaaggggttttcgtgcctcagcctcccgagtaaccgggactacaggcaccctccaccatgactggctgttttgtatttttatttttattttgttttagttttgagacagagtcttgcactattgtctgggctagagtgcagtggcgcaatctcagctcactgcaacctctgcctcccaggttcaagcgatcctcctgcctcagcctccctagtagctgggattacaggcacctgccaccacgcccagctaattttttgtatttttagtagagacggggtttcatcacgttggccaggctggtccctaactcctgaccttgtgatttgcctgcctcggcctcccaaagtgctgggattacaggcgtgagccaccgcacctggctaatttttgtatttttaatagagacggagtttcaccatgttggccaggctggtctcgaactcctaacctcaagtgatctgcccacctcggcctcccaaagtatacttggctttttgcttagggcagggagtgtgaatgagcatgagggccaggccatggtgcgaaggaccctgtgctctgggcacccccttgcatggatctgggtctgggtgagtcactgcctgagtcagggaacccatgacttttttttttttttttcccgagacagagtctcgctccgtctcccaggctagattgcagtggcacgatctcagctcaccacaacctccgcttcccgggttcaagcgattctcctgcctagctgggactacaggttcatgccaccatgcccggctaatttttgtatttttagaagagacggggtttcaccatgctggccaggctggtttcgaactcctgaccttgtgatccgcctgccttggcctcccaaagtgctgggattacagacgtgagccactgcgcctggcccaacctatgacattttacacttgcatggtgagtccccgtgtgggcaggctgtacccacacccttgcctgcctatctgattccccagactgaagtgggggcctctgagggggtaaaaggatgtggtctttcgggactgcttggcctttagcttggtgggtggagcctgtatcctaccttgttttaacccaggagtcaccccaaaatatgggggggacacaaactgaaaagggaggctcagacatgtcagaaccattggctgagtcgtgggtcaggggaccagggtttccctagattcttcctggggagatggatggggagccagagataactccctgatgggcagatgccctccttcttggcccaactcctgtcccgttacagattatctttgtcttttgttttgtttgtttgagatggagtctcactctgtcacccaggctggagtgcagtggcacggtctcacttcactgccacctctgcctccccggatcaagaccctcccacctcagcctccagagtagctaggattacaggtgtgtgtcaccacacctggttaattttttgtgtatttttagtagactctgggtttcaccatgttggcctcactggtctcgaactcctaacctcaagtgatccacctgcctcagcttcccatagtgctgggattacaggcatgagccaccgcgcccagccccagttacagattatctatctggacaaggacaggaggctcccaggagtgggggaacttggatgttggcagaagtgggctggtctaaggttccccaccttccttgttccacctccagcctctggggaagtaggtacctgcctgggagagtgacatctcagctcatgccccacgccccagtgtgatttgtggctggcctgtctgtatctgtaatagtgatagcttggtctaaaaggagaccctgggaacagacagagtgggccggccaggagcctgacagcacagccctagcctggtcgcagatgtcacctgacaactttccatttgcaaatcctccttcctcctcggacatccggacaccccattgccccctctcagagcccaggtctctggtttctgcctgtgattctgggctgtagcccctttagaaactcaggtgtcctggtcacctcctacccccagggctgactagccttcagcttggcagtccctgcccctggggccctagtaaccagagccaggctccagccggcttttccggttagaggttggaggtggtgcccagagtgcccctggagggggtggaggggcctacgccccggaagtcctgagccttggaacgctttcaggcctggtggcggtgggagccggggctggcccagacgctgagtgtctgcagtcagggagcatcgaggcagatgttttcaggccttggtgtcaggggtgggagagggatgcctcgttttggggagggggccacccgaggaggctggagggcggcggccctgtggactatccctcatgtgctcttcgaggtcagacaagtcagatcaggtgcaggggtgcccagaggggaacagtggccgcttggttctgggcaggtggtgacgtctgcatggagggtgactaaggccaggctaagagggaagtgggggcacacactttggtggtttggacaagtttgggcagggagggtcacaggcctgcctgtgtccggctcctcggaggaccccctgcagagcctcccatcctgagggtctctctctacaccccccgtctcgtcccgtcccacaggcagcatgatcccagtggccgagttcaagcagttcacggaacagcagcctgcgttcaaggtgctcaaaccctggtgggacgtgctggccgagtacctcaccgtggccatgctcatgattggggtctttggctgcaccctccaggtgaggccctcccctggcaagggggtgtgaccagaggggcggggcaggtgtctggggaagtcgggaagccttctcatcacccaagaaagagaggaaactgaagacagagccccactcaaaggccaatccagaccccttatcttccttacctccatagccaggagcaccggagtccccacattgctatgccattccatatctttttttcttttttgagacggagtctcactctgtcacccaggctagagtacagtggcatgatctcagctccctgcaacatctgcctcccgggtacaagcggttctcctgcctcagcctcctgagtagctgggattacaggcgcccaccaccacgcctggctaattttggtagttttttagtagagatggggtttcaccatgttagccaggctggtctcgaactcctgacctcaagtgacctgcctgcctgggcctcccaaagtgttgggattacaggcctgaggcactgcacctgaccctttctttttttttcttttttttttttttctttttggctaaaaagagacaggggccgggcatggtggctcacacctgtaatcccagcactttgggaggccaaggtgggagtatcacttaaggccagaagtttgagaccagcctggccaacacggtgaaaacccgtccttactaaagacacaaatattagccaggcatggtggtggacacctgtaatcccagctacttggaaggctgaggcaggaaaattgcttgaacctgggaggtggaggttgcagtgagccgagatcatgccactgcactccagcctgggtgacagaacgagactccatcttaaaaaaaataaaataaaataattgaaaattaaaataaagaaacacggtctcattctgtcatccaggttggagtgcagtggcatgatcacagctcactgcagccttgaactcctggactcaagtgatcttcccgcctcagcctccagagtagctgggattacaggcacacaccaccacgtccagctaatttttaaatttcttgttgacacaggggtcttgctatgttgcccaggcttgtctcggactccgggcctcaagccatcctcccacctcggcctcccaaagtgctgggattacaggtgtgagccactgtgtccagccccatattttcacaatgctcagttttatccctagaatctggaaaggactgcagttgctatatgagtttgttacttctgttgtaacaaagtagcagggattgagtggcttaaataaccagaaatgtttcctcttctgggtctggttctggaggccagaagtctgagatcaaggcgtcagttgtcagtgagggagaatcttccaagcttccctcctagatttttgcagctccaagagttccttggcttgtagatgacattctcccagtatttttctttttctttttcttttttttttagacagagtctccctctgtcgcccaggctggcatgcagtggtgcgatctcggctcactgcaacctccgcctcccgggttccaacaattctcctggcttagcctcccaagtagctgggattacaggcgtgtgccaccacgcccggctaatatttttttgtatttttagtagagacgtggtttcagtatgttggccaggctggtcttgaactcctgacctcgtgatcaggatcagcctgcctctgtctcccaaagtgctgggattacaggcatgagccactgcgcctggtcgagacagttttttttttttttttttaagcaagctctgtcacctaggctggagtgcagtggcgcaataatagctcactgtaaccttgtactcctggcctcaagcaatcctcctctaccacccccgcttggccccccctcccactgcctcccaaatcactgggattacaagcctgagccaccgcacccagcctctccctgtatcctcacgtcatcttctgtctttgtgtctgtctctgtgtctatgtttcccctttctctaaggcgcagtcatactgggcccaccctactggctttgtcttgactacctctgcaaagaccctattaccaaacaggagccgcctgacccagctcaaataataccacattctaaggattcggagttgggacttcaacatcttttgtggggacacgattcaacccagctccttttctcagacaaagaccagtgctttgtcagttgtggtggctcattcctgtaatcccagcactttgggaagctgaggcaggggatcacttgaggccaggagttcgagagcagcctggccaacatggtgaaaccccatctctactaaaaatacaaaaattagctaggcgtggtagtgcgtgcttgtagccccggctactcagcaggctgaggcaggagaattgcttgaaccaggaggggaaggttgcaatgagccaagattgcaccactgcacacagcctgacagagcgagactcttgtctcaaaaaaaaaaaccaaaaaaaaaaaaaacagtgcttagaggtttagcaaaactcttccaaaatcacagctggctggcaacagtcagagatggggggtgcggggggtctcccaccttcagcctgctttttccccatccccctcattttctctcttttttaaattaatttatttttgagacagaggctcactctgtcacccaggctggagtacaatggcgcgatctcggctcactgcaacctccatcttccgggttcaagcgattctcctgcctcagcctcccgagtagctgggattacaggtgcccaccaccatgcccggctaattttgtatttttagtagagacagggtttcaccacgttggccaggctggtctcgaactcctgacctaaagtgatccactcgccttggcctcccaaagtgctaggattacagccctcattctcttttgctcctcaggtgacacaggacaagatcatctgtctacccaatcatgagctccaggagaacttatcagaggccccgtgccagcaattgctgcctcgggggatccctgagcagattggggccctgcaggaggttaaaggccttaagaacaatttggacctgcagcaatacagctttattaaccagctgtgttatgagacggccctgcactggtatgccaagtacttcccttacctcgtggtcattcacacactcatcttcatggtctgcaccagtttctggttcaagttccctggcaccagctccaagattgaacacttcatctccatcctgggcaagtgtttcgactctccatggaccaccagggccctatccgaggtctccggggagaaccagaagggcccagcagccaccgaacgggctgcggccaccatagtggccatggcagggaccgggccggggaaggcaggggagggtgagaaggagaaagtgctggcggaaccggagaaggtggtgaccgagcctccagttgtcaccctgttggacaagaaggagggtgagcaagccaaagccctgtttgagaaggtgaagaagttccgcatgcacgtggaagagggcgacatcctgtacaccatgtacatccgacagacggtgctgaaagtgtgtaagttcctggccatcctggtctacaacctggtctatgtggagaagatcagtttcctggtggcctgtagggtggagacgtcagaggtcacgggctacgccagcttctgctgcaaccacaccaaggcccacctcttctccaagctggccttctgttacatctcctttgtgtgcatctacggacttacctgcatctacacgctctactggctcttccaccggcccctcaaggagtactccttccgttccgtgcgggaggagactggcatgggggacattcctgacgtcaagaatgacttcgccttcatgctgcacctcatcgatcagtacgactccctctactccaagcgcttcgccgtcttcctgtccgaggtcagcgaaagccgtctaaagcagctcaatctcaaccacgagtggacgcccgagaagcttcgacagaagctgcagcgcaatgccgcgggccggctggagctggccctctgcatgctgccgggtctgcccgacaccgtctttgagctcagtgaggtggagtcactcaggctggaggccatctgcgatatcaccttccccccggggctgtcacagctggtgcacttgcaggagctcagcttgctccactcgcccgccaggctacccttctccttgcaggtcttcctgcgggaccacctgaaggtgatgcgcgtcaaatgcgaggagctccgcgaggtgccgctttgggtgtttgggctgcggggcttggaggagctgcacctggaggggcttttcccccaggagctagctcgggcagccaccctggagagcctccgggagctgaagcagctcaaggtgttgtccctccggagcaacgccgggaaggtgccagccagtgtgaccgacgttgctggccacctgcagaggctcagcctgcacaacgatggggcccgtctggttgccctgaacagcctcaagaagctggcggcattgcgggagctggagctggtggcctgcgggctggagcgcatcccccatgcagtgttcagcctgggtgcgctgcaggaacttgacctcaaggacaaccacctgcgctccatcgaggaaatcctcagcttccagcactgccggaagctggtcacgctcaggctgtggcacaaccagatcgcctacgtccctgagcacgtgcggaagctcaggagcctggagcagctctacctcagctacaacaagctggagaccctgccctcccagctcggcctgtgctcaggcctccgtctgctggatgtgtcccacaatgggctacactccctgccacccgaggtgggcctcctgcagaacctacagcacctggccctctcctacaatgccctggaggccctgcccgaagagctcttcttctgccgcaagctgcggacgttgcttctgggcgacaaccagctgagccagctctcgccccacgtgggtgccctcagagccctcagccgcctggagctcaaaggcaaccgcttagaggcgctgccagaagaacttggcaactgtggggggctcaagaaggcggggctcctggtggaagacacgctttaccagggtctgccggcagaagtgcgggacaagatggaggaggaatgaagctggggtggggccgttttaggtagagccttaaaaatgcttctgccctggaatctcaaccattgtcttccaagataggaagccaagtgggtccaggccaggagatggggggggcgggggcagctgtgtcatctttctggggcccaggaggatctgggctggtttgtctggggagacagacaggatgttgtggagctggggtggaacctggtatggagggattaactcagtcatggcattctccgaccaaaaccacacctgtgtctctggcaggctggctggccttgctcccatccctagaactgctgcctctccctggatattccagctcaattagtgccacatatgggggaaacgacacatcccagtgggatttccaacactccccctccccatgcaacaaagcaacttacttctggagttctctcccaaggagaggacacagacacagttgtttgctgtgttatatgttagctccgaacaatggttctcatttggctaagcatcaaaatcacctagggagtcggtgcaaaacaaaatatcccagtcccctcccctgaaacactgactcaggaggtttggttgggggccaggagtctgttcctaaatattccaggtagttctggtgcaggtaagtggccctgagacagtatgttgggaaatgctgacgtaaaggtatcagggccgggcgctgtggctcatgactataatcccagctgtttgagaggccaatgcaggaggatggttgagctcaggagttcgagatcagcctgggtaacatagcgagaccccacctctgccaaaaaaaaaaaaaatagggtatccaaatatctagattctgatcccttttgaggtcctagaccctttgagaaactgatgaagccaggcacctccttcctcaggaaaatgctggtgtacaaatacacacaaagctcttcaggcagctgatagatttcccccagagagctattcaaggacttcctaaggtgggtggactgcagggttaggacacctgctatagaggtgacatttttccaaggacaagcagggactttggtcttgactgttctctgggtgcttaataaataatactaattatgcaagttctagttttgatctcttatgtgcactcctgtcattgtctaacaccgtccattagggccagacatagtggctcatgcttgtaatcccagcgctttgggaggctcaggtgggaggatcgcttgagctcaagagcttgagaccaaactgggcaacatagtgagatctcatctctacaaaaacatacaaaaaaaagttggccaggtgtgctgatgtgtgcctgaggtcccagctactaggcaagcagaggcaggaggattgcttgagcccaggacccaggaggttgaggctgcagtgagctgtgatcacaccactccactccagcctgagcaacagaacaagaccctgtttttctttcttttttttttttttgagacggagtctggctctgtcacccaggctggagtgcagtggcgcaatcttggctcactgcaacctccgcctcctgggttcaagcaattctctgcctcagcctcccaagtagctggaattacaggcgcctgccaccatgcccggctaattttcgtatttctagtagacacggggtttcaccatcttggccaggctggtcctctcctgacttcgtgatccatccgcctcggcctcccaaagtgctgggattacaggcgtgaaccaccatgcccgtaaccttttatttcatgtgaccaagtaacacccgtgtgccagaatcaaggatgagtctcatgttctcagagcagaggcacagaaggctgcctggaagacggaaaggtaaagacctcagctataactctacacttgtgtgtgctccacccacaaatcgtcaccagaggagttccgacaagccggtaactctcatcccaaagtgttccctcgttggaccagaagctggaagggcacttggcagagtctgcctggccctggccacctcccgggtgtccgcaaaatcagaacttccttctcgcatctaagagcagagggaagccgctcttggggggatccctgggttccagatgggacatttccccagcacccgtcggaccacttaaaggagtggtttaggctgccgggggcccaagcactggcacctaaccccagcgcccctcctcagataggaattctccacgtccaggcgctgggctcacgttccgggtgcgagagagataaggggggtgtcttgaggttctatgtgggtctggccaacaactctggccttgaccttggccccgtcgccgagggcaggggtcacaccgctgggttcccatggccgtcccctcccccctggcttcggccaactctgagcctgctggggctggcaagaagggaaagggctctcgacggagcctaattacggtgaggaggcggcaccccgctgccagcaggaggctaggaggtaattaagcacaagaggaatcctaataaagcaccatcagtgaggaaggcattccgaagggacgcccaagccgaccgtgaaaagcgaggaggctgaggctgcaccgccgtggagaccagggatcgactgccgctttgggaacgaggttccaggaatgcgcatgcgcaaaagccacgcgggcgaacacggcttcgcctcgctaagcatgcgcgccgttttccccgcccaccgtcctcagaagaatggtgtttcctcgcagcgcctctctcaggagcgatcgggaattggcgcatgcgcactacggtggtggtggcgacgaaggcgggggttgcacgttgcctgcctcgagctctaggtggcgtcatccttcgggctgagccgaagcacgcacgcgcggaggttcgcacgcggagaagggcgggtgcgcgccgcgggcatgcgcggtgcggggcgagacggcggctcgacggggtcatccgggcgcaggcgcagtgcggtgtttgtctgccggactgacgggcggccgggcggtgcgcggcggcggtggcggcggggaagatggcggcgtcctccctggaacagaagctgtcccgcctggaagcaaagctgaagcaggagaaccgggaggcccggcggaggatcgacctcaacctggatatcagcccccagcggcccaggcccagtaagcacggcggcgtgggggagggggcgggcgggcggggcggggcgcgcgccgcgggaggccccgcccccaccacaaggccccgcccccgcttccggggcgctcgctctcctctccgccccccccgctgcgggctcgcggggcgagggtcacggtgacccggggggcgtggagccggcgagctccggggggttcgcaccctcagggcttgggagcccagttcccggacccaggcgaggcccccagctgatgacccgcccccatcgccgtgatcctctgggtcgggcttccccgactccacgcgacagtgaccacatccaggtcgccccgaaaacacagacacgtccctgttgacctgatgctaccactctcgtcatctcagggactgtctggcgcccccctcccccggcctgggggcttgtcagccccgtgcagcgacgatctacgcacacgcgcacgcctggctcggggacacctgaggttacttgaccacatagagcccctccccatctcttctgacccgaggattctccctctcgctctccctgtgaccgtgtctgaggtggggggacgggagggggtcccttctccccctcttggcgacagtgaccatggcattgggctcagcagaccccctcccacatacaccaggccccgcaaatccctgtgaccagtttcactgccaccatcttggtgagcgtgtggtgtctgacctccagaaatgcacatcgacccccagccagcccggtgactttgtcacctgtgttcaagtgatggctccccttcccttcacacccacacccacctgacctggggacacctggggccagtgtgactctaggcctgctcccgccgcgccccagcatacatccacctgctttctgatcagtcccaccacctcggtacctacctccctgacaccttgtcatcctagatcagtacctctcgcttcacacacacctggcctgggaacactgaccatatctagtctcccggctttttccccaagatcctggtctctaaatcctctgggctggaggaaattagattttcaaaccctgtgaacaccacccctgacccatgatcctttttgtgtctttcttgacccagtaaaattctctcttgtctcctctgatgtgaccttcgtagtttatttagttctctctatggagtcattatggcaggcgagaaaggtacccccgtatctgggcaccccacccattccctggtcacccagcctgaccttcacagcctgacaccctcctgtccctccctctcctgacctgagtcagcgtgggttcctccttggggagtctcttgggggtccagagaaatcatggaggtggggattctggtgcaggacactgcctgagacaagaagcccagccaagacacgggtccctgctagcccctgggggccgccctccctggcccctgagtggatgagacagggttgagtccaggatcccgggtgccttcaggggtggccgttcccatgcagagctaggaggccggtggcaggcaggcccccgaggagtcccctccaggcgtctctgtctgtgtcaactccatcccatcctccccgccctccccatctctgtcggttcctagccatctctgcagttcggtgcctccccctcctcctcgtttatgatttgatttcttttcttttggacgaatcagtcgtttctgttgtgatttatcgtggtgttgtttttttcttccttttccccatccagttattgtgatcactctaagccctgctcctgccccgtcccaacgagcaggtaccagcctttttatcatcgctgcttggacatctgcaccattgacctaaccgctgccccggccgcagaatggcgtcccccagcccccatgctctgtgtgtgtccccatgtcccttcccctcactctcactttctctctcactccactcaagcagcggtcagcccagcccagcctcctctgcgtcctccctcctcctccccctcccttactcccagctccactttggactccctggaggaggaggtgggctcccccactgaatgggagtctgtggcctccgggggtggggggggtgcacgcctgtgtgtgtgtaactgagagaacgagaaagttgggcctggtgggtgggtggcctgtgcctatggatctctctcaacaactaggtgaacacatagcaccccccgggttccataccagccctgggcgccagggacacagcagtgaatagaacagatggagcccctctcctctgtagcggggggctgcaataggggggcccactggacaaggagcacattcccaccagagagaacattctagctgggtgagcggccctgcagggggccagcctgggggaacctctggagacggtgggaattgaacaaagcctctggggaggccaggcacggtggctcacacctgtgatcccaacactcggggaggttgaggctacagggagccatgatcacaccactgcaccccagcctgggtgacagcgagatcctgtctcaaaaatttaaaaactgggccaggcgcagtggctcatgcctgtaatttcagtactttgggaggccaaggagggtggatcacttgaggtcaggagttcgagaccagcctggccaacatggtgaaaccctgtctgcattaaaaatactagagattaggccaggcacagtgactcacacctgtaattccagcactttgggagaccgaggcgggtggctcacctgaggtcgggagttcgagaccaccctgaccaacatagagaaaccccgtctccactaaaaatacaaaattagccgggcatggtggcacatacctgtaatcccagctactcgggaggctgtaatcctagctactcgggaggctgaggcaggagaaccgcttgaacccgggaggcggagattgcagtgagctgagatcgcaccattgcacttcagcctgggcaacaagagcaaaactccatctcaaaaaaaaaaaaaacataaaagattaggtggaggttgcagtgagctgagatcgcgccactgcattccagcctgggcaacagagcaagactccgtctcaaaaaaaaaaaaaatttaaaaagcgtcttgaaggagttggggggggagagaagacagggccgccagggctctgagcgcagcgccagcctgtgtggggcatgcaggctgtgccccacgcctgtgttgggagagagagtagatggggtgcctggccctgtgagtggttgtgagtatgtgtgtccgagggcaagggggactctgtcccggctgcatgggtgttaggtccacggcatgccccgggtgtgtgttgtgcgtgcgtgcacttgcacggcatgtgcgtgcatgttgacatggcagccggtgcacctgtggctcctgtcggcagacacgtgccctccagcctctcgctctctctcatccgttctctttctcatcctcaccctcttgctctcactccaccctcctgagctgccatgtggccatcaccacctctgtggcctctgttctcagggcctttgtgtacctccttcccccagtgcctacctgaaccctcccttccatccccccatgctccagtctgtggtccggcagcctcctccccaggctccggggccaccctcggaaggcctggtgggctctgtcagggaaggggcccacaggactcctcgagggctgtggtcgtcaaccgctgagtgcagggtgtgagcgggactcggatactctctgagggcgggaactaggcagtgtctcaagagatgccaggtgcacaggggttgggggctgggttggggggagcacaggccctcgggagccagaaggggactggggctgtggctcaggccatggacagagcagaggcgcagggacctgaagaagcagagggagaagcctggccaacatagcgagaccccatctctactcaaaagacaaaaattagctgggtgtggtggcgtgtacctataatcccagctactcaggaggctgaggcaggagaatcacttgaacctgggagggggatgttgcagtgagttgagatcacgccactgcactccagcctgggtgacagagcgagaacctatctcaaaaaaaaaaaaaaacagtgggaggtgacgtggtgctgcagaggcggcagtggccaggacagcgggaggggcacgggaggtgaggcctctaggccagtcatgaacgctgggcctggctgtgtcccaaggtccccagagcccttcccctgctcctgcctggtcctccaggaggggagctagggggcacagctcctgcaggggctggcaggaccagataggggcaatgctgggcctcctgcattgggactgaggcgtcttcctgcccctcctactggctgagatcagggtcctgggcacacgggagggacggggtttagctgccagcatggagcgggtttgtctgttcatattagtccctgggcaccagtcaccaggagcctgcagaactgtggggagaaaaggtggacgaggcaggaggaaaagaggggagaggggcttgttggctgagggctttggagagcggcaggccccagctcctgtgggaggggcaccttggtaggtgtgtgtagccgttgtcagggcctctaggatgtgacgtgtcaggattggctcctctggaggccacgttagcatcccggcctctgttcctgcaccctgttgccagcccagccagggagaccctagctcctccgggaagctgccctcctgtcccaggcccctctctggcctgtctctgcagcgcctcctctgggcacctgggccctagtcttggttcctgtctgtctgtctgtctcctgccctcccacccctaatgccgcctgcccaccccagggtgcctgctgcctgcccgccgcctgcccacccgctgtagcatgcccgagctgcccgcatgcaggctgctggatgagccaacccccgcctggcccagcattggccccacctggtcccgccagcccctgcaggagctgtgcccccgagctctcctcccagaggatgcaggccccctgaggtcctgtcctgcccccatgggccccagctctgcaggccaggccaggaggccctcatgtcagcccactggcccgaggggggccctccctgaccccggaacagaagatagggcaaggcagcctgaagcctgggtctcgtgcccgctgcctccccagcgtggccctgctcgctcttgtctgggagccaacttcagtgctaccagcagagccacagcctgggccagccctggcaggcactccgccctggcctatccatcctgtgggtgctgtggccctgggcctgcttcctgggcagaagtgggaggaagtgcacacacctgtcagggaggccccctggccgagggacacctcaggtccccatctcgtttctccgtcagcgtagacttggggctccctctcccctgctagcctcctccatctctttccaggtcaggggatgagacaagggaccctgagaacagtctggggtgggagggagaccccagctcctccagcccagcagggcagggggctgtgccagcctagctcgggaaacccaggaggggaaggtgagggtcccgacccctccctggagtgccagatgtggagctgacaccagctgggcgctgacccccctccctgccactggttctcacccccctagccctgcagctcccgctggccaacgatgggggcagccgctcgccatcctcagagagctccccgcagcaccccacgccccccgcccggccccgccacatgctggggctcccgtcaaccctgttcacaccccgcagcatggagaggtgagccaggggcccagcagggttgggtgggaagcagcattgaggggccaccgtgccagccctgggaggagggtggttaaaccggtgggaaccccggtatgggggactggggtggccaacctaaggtcaggacccacctccaccggcacctgctccatgtccccagcattgagattgaccagaagctgcaggagatcatgaagcagacgggctacctgaccatcgggggccaggtaccaccttcactgtggcggggagagggaggaggcccagccaggctggacccatcctgggagcgccagtggggggcagggggcggtggcagaggccccagggaccctccaaccctccctctcctcccagcgctaccaggcagaaatcaacgacctggagaacttgggcgagatgggcagcggcacctgcggccaggtgtggaagatgcgcttccggaagaccggccacgtcattgccgttaaggtgagccttggcggctaccccggctgcgccccacaccccaggccggtgctgaggctccctcctgtccctgcctgtgcagcaaatgcggcgctccgggaacaaggaggagaacaagcgcatcctcatggacctggatgtggtgctgaagagccacgactgcccctacatcgtgcagtgctttgggacgttcatcaccaacgtgagtacctggccgcgccctgcagcgtctcctcctccctcacccctgccccttcctagggagcagagcctctggggggtgggccggaagacacagctcccccgggtgcccctctccctgcagacggacgtcttcatcgccatggagctcatgggcacctgcgctgagaagctcaagaagcggatgcagggccccatccccgagcgcattctgggcaagatgacagtggcggtgagtgaccaggcggggcttgcactgggcaggatgacagaggcggtgagtgaccaggcggggcgtgcactgggcaagatgacagtggcggtgagtggccaggtggggcgtgcaccgggcaggtggccttgggtctgtgccccctgccacatgcacccccctctgcgtgcctgcagattgtgaaggcgctgtactacctgaaggagaagcacggtgtcatccaccgcgacgtcaagccctccaacatcctgctggacgagcggggccagatcaagctctgcgacttcggcatcagcggccgcctggtggactccaaagccaagacgcggagcgccggctgtgccgcctacatggcagtgagtgggggccccccagcgggggagggggtgggggctgggaggccggccccagccttggagatacgtcttctcctcccccccctgcagcccgagcgcattgaccccccagaccccaccaagccggactatgacatccgggccgacgtatggagcctgggcatctcgttggtgagttggggccctcccctgttctccagccaggagtgagggcttctgggggactcggagggaggagaacataaacctgtccagccctgcccgtctccctcccaggtggagctggcaacaggacagtttccctacaagaactgcaagacggactttgaggtcctcaccaaagtcctacaggaagagcccccgcttctgcccggacacatgggcttctcgggggacttccagtccttcgtcaaagactggtgagaacctccctccacttgggaggtcagggacagcccgctgctctgggcagctggggaggcaatggcaggaggggaatggaggccgcaccctgggatgggcggatgcgactgtgggcgggctcctggctggcggctgccacaggagctggagctggtgcccagggagccatgagctgggtttggacctagcctgaggggacagccagccctgtggcatttggcggggtggctgttggagattgtgagcacgcttctgcaacaagcacagctacaagttcaggagggccatgttcgattctctcaggggagccccacccacctttctgggggacctcagccagctctggccccccaagccaggcccttgccacctggccctaggccaggaggctccgggactcacagttgctccccgctgtcagccggggtcctgaggacatccacagctccttcccccacacacatcttggggacccctggccccttggggagggcctgagcacaggggtggggccggcatcccctcctccctcgttctcacatctgtcttcccttctcttgctctagccttactaaagatcacaggaagagaccaaagtataataagctacttgtgagtacctgagccctcccagtccccgtcctgtccctgcggaggcgcgaggccaggagggaagaccgtctcctcctaagccccaccccctcgggcccacaggaacacagcttcatcaagcgctacgagacgctggaggtggacgtggcgtcctggttcaaggatgtcatggcgaagactgagtcaccgcggactagcggcgtcctgagccagccccacctgcccttcttcaggtagctgcttggcggcggccagccccacagggggccaggggcatggccacaggcccccctccccacttggccacccagctgcctgccaggggagacctgggacctggacggccacctaggactgaggacagagagtggggggtgcccacccaccccccccgccccgggcctaccaagcccccgcccttcccaccccggggtcagccggccgtgtgcgtcccccgacagacactgtgaacggaagacagcaggccgcgatcagagtcgctgttcattcagccgcagcctctgggccggggcggcccccaggggccaggagagagccctggagtcccgcagccaccatgcacgctcccagcgtgctgtgtccttcgccactcccacgcgcccgttcctcttccgtcgccctctgtcccctgctctacctctctgtccttgtctggctctcccgtcaccctccctgcctctgtctctcttctggcctgagcctgggcccagccacctcctgacgggtcccctgggtctgcataggtctcccatggcgcaatgagtcagtggcccccagccaggcagtgtgggcattgccactgcggctggacggggctgcgcgctcgcgctctctctctctctctctctctctctttgatctcagggggtcctttttggagtttattgtattttattgtacttggtggggtgtttggggtgggggcggaggagagcttgttctcgtggggttgtcggtaccttcagaaacttttaccaaagtcacgattagctgcttgtggtggggccccaaccgccctcgggcactggggagctgggctggggctgctgctctggggtctccgggggccacagcttggggtgagttgaagacctcaggggatgtggaggggtctgcggggccctggccgcacaggatggccttcagggaaggtggtcttggggcatggtgcagagcaggtgaccggagggaatcggtgacggagcggggccaagggaggggtccggagggagtcagggatggagggcagagggagtggatgtgggggtttgaggacgtgtgacaagctccagcaggggtgggggccgggctgagggtgggggtgcgaggtggtcactcccatcgtgcccctggccgtccctccactcacccacacctggcccagtccacgttgaggtccaggactgggaaggaccgggtgagtgcaccggggacccaggccaggtgccccccggagcctgctggggtggccagagcaggagggggtgtgtttcctttttgtgggtgttgcatgcaaatcaagtggacaagaaaaaataacaaaacaaaaaacaagaaaaaaaaaacacaaaaccccgtaaaatcacaaagaaaatccaacaccaaaggcgcagaagccggctggccgtggtgggggcagcgtaggcgtagcatccctctcctctcacttagcctgttgactcttgttattatcatgatattcacaaaacgccgcatgtttaaaaagtcatagatgtcatcttctctctgcccccagggaggaaagccaccttctcttgccccttggcccctttgtcaggggccaggggtctgccgggtgggggtgccaacaggcctggccctttcctcccctgcatccagccatgggggcctctgcgattgccggaaggttgcatggctggtcccagggccagcacaggcccgaggccgggctgcctggttttatttttatttaactttattttctgttttatgagtgtgtgtccgcccacccccacccccttcagtgttaagtggggagccctgggggagtctctcctgcctcccagcctctcccaagacctcccccctcgtcaccagccatccctctggaccaggcagagggcggaccgggtgggcaggggcctgagggtggctcgggccagcccaccagccaatggacccctcctcaggccgccagtgtcgccctgcccctttttaaaacaaaatgccctcgtttgtaaacccttagacgcttgagaataaaccccttccttttcttccaccgagtctgtggtgtgtcatgggcctggcagggcgaggtgggaagggggtggttgcggggggaggtttctgcattgaggggagactgaggcaggtttgggagctagacgggaggtgtttgtagtgacttgccgatgggtatcaagcagctggtgtaagggaccccctgcccccagtggccacaggtcgggcagcagaggatcccttaatcccctcaggccttgggcattggctctggtgtcagcccctcagtctgccacccccgctccctgcctccctccttgccaaggacagggccgcctgcccacgtgcgggacctgggtgcagcccagctggtgtctgctctggccccaaacactccgacctcagctggtccagcatgctgggcaccgtgctgctgctggccctgctcccagggatcaccaccttacccagcgggccacctggtatgtatgggcagggaggtgacgggtctgtcatgcttctatccctgtttcaccctctttattttttttgagatggagtcttgctctgccacgcaggctggagtgcagtggcgcaatctccactcaccgcaacctccgcctccccggttcaagtgattctcctgcctcagcctcctgagtagctgggactacaggcacgcaccaccacgcctggctaattgttgtatttttagtagagacagcgtttccccatgttggccaggctggtctcgaactcctgacctcaggcgatccgcccgcctcgaacttttcaaagtgctgggattacaggtgtgagccaccgcgccccaccgatgtcactctctttcaactagacctttggtggtggtcctcatgggggtggggacagggcaggggagtggggtggggtctctgtcccccatcccaagggtggctcacatccccacttcggcaaagctccctgcagccacggagagggccagagttgtgggagggggccagtctacccaggtgctcttcagaagtgggtgtggtgtgcggatggacaagggggctcatgcctgtaatcccagcacttaagagaggctgaggtgagaggatcgcttgaagccaggagttccagaccagcctgggcaacatagaccccgtatggccgtggtagcgagtggctgtggtcatagctactcgagaggctgaagcaggaggatggctggagcccaggaggtggaggctgcagtgagctgtattcgcaccactgcactccagcctgggcgacagagggagaccctgtctcagaaaacaagaaaaatggatgtgcaggcaatctttcgtatttggagattagccgttttaccaggaccccgctcagcacctgaaggcagacatcagcgtgtgtttaggggcacgaagaggggaggggtcccatggctgcctcagcctggacaagtggaagcgtctcagatcttggtggcctggctgggctttggctgtgcccaggagagcctcttgggagggtatcctcttcacttcccttcctcgttggtgacagcacctatctccccttagaaaggggagccgcctgtcctgctgcgtccccaagagcagccctggggaaggtgggggagctctgacttcacccagccggaccccaccatcgggtgctcctcaccgcttctcttccgccccagggagggcttcgccagcttcggaggcttctctaggggcgcatggctctgcaaccggctcagttgctgggctgtgcgagtcccaggggtcgccagggggcacatcaccgtcaggggggaaagtggcgcggagcccatcatgggtgaatcggccgccgcaaccgcatcccttttccaaaggcggcggcgggggcgaggtggtcgggtcacttttcccggaggcctaaagggcagcgcgcgttttctctcctttgggccgcccttccccgccccgccagctcccccgttccccgcggcgcccggcccctggctgcgcagacccctcttcagcctgaagctgtccgacacagaggacgtctttcctcgccgcgcggggccgctcgaggtcccggccgacagccgcgtgttcgtgcaggtggggaccccggggacaccaggggcggatgggggccggtggggacgggcgatccctgatggcgcctccgtcccccaggcggccttggcccgtccctccccgcgctggggcctggccctgcaccgctgctcagtgacgccgtcctcacgcccggccccggggcccgccctggctctgctgcgtgagggctgccccgccgacacctctgtcgccttcccgccaccgccgccgccgagcccgggtgccgcccgccccgcgcgtttcagcttccgcctgcgcccggtcttcaacgcctcggtgcagttcctgcactgccagctgagccgctgccgccgcctccggggagtccgccgggcgcctgcgcctctgacgccgccgccgccgccgccgccatcgcgggtgcgcgggcgcagagcctggaatccgggcgctggggcccttcgggggctgggcacgggcgactctggcagtggaaagaggatactctcggggtctgaggatctgggggttgggggaggtggggcgcaagggtccatctctgccgacagagtttctccggggacagtgtggacactgggttcccccatggacagctctggaatccttcagggctgggggttggatgcagaaggccactaaggggacacatttctgggaacctggtgctgggcctcacatgctaggtgctgggagacgcggaccatgcgatcttgtggggctgggatttggggtccttaggggctgggcggctagccacttgtatgcgtaggggctgggctcagggcaccctaaggggccggatttccaggggtcccatcttggctgtggtggagagctggactcaggtctctcttgggggccctggggaccagagccacgatcccggtgccctgatgtccccgtctcttccccaccttcctctcccccagtgtctgcctcaggacgaggcgtgcgccgacactggcagtggcagcgccgagggcctggctgctgacggcccccacctgcacacgctgacgcagcctatcgtggtcaccgtgccgcggccgccccccagtgagcacgcagtcctcctccgcatggggccgtggggcggcagagcgggtgggaaggacgcctgggagctggacccagtctcagcgtggcacttcccacagggccgcccaagagtgtccccggccgtgcagtgcgccctgagcctcccgcgccggcccccgcggccctggaacccgcgccggtggtggcgctggtgttggcagccttcgtgctgggcgccgcgctggccgccgggctgggtctcgtctgtgcgcactcaggtaccgacgacctccgccaagccgggcccccagtctaatcccgcgcgtcgggacccggggcggccgcgatcccgcctgcggggcctgatcaaccctagctaggcctgcctccgcgatgcccgcagcagcccccaggggccgcccttagcctggcgtggcgcgcagcagcccttctgcagctcgcctctcccttccagcgccccacgcccctggcccgcccgcgagagcctcgcccagcggtccccagcccaggaggtcccagtgaggaaggtaggtatggaggtggagggagctgggtgaggtaggagatctgacagtgacgcttcctagcgcttagttcgtgccaggcactgtggtttttttgtttgtttgtttgtttgtttgtttgttttttgagacggagtttcgctcttgttgcccaggcgggagtgcaatggcgcgatctcggctcaccgcaacctctgcctcccgggttcaagcgattctcctacctcagcctcctgagtagctgggattacaggcatgcgccaccacacccggctaattttgtatttttagtagagacggggtttctccatgttggtcaggctggtctcgcacacccgacctcaggtgatcctaccgcttcggtctcccaaagtgctgagattacaggcgtgagccactgcgcccagcctccaggcactgttgtaaatgttttacgcctatgaactaacttaatccccttaacctctaggcggacactattataatccccattttagagacgagaatgatgaggcattctctgaattaagtaacttgtcaaaagtcacaatactgggtggagcttggattcgaactcaggcagtgggtcacccgcggcaggcgcgggctttgggtcgagccaggggcattaggtgaggagaggcactaggcgaggagaactcagcattcggacccggctcccactctcaccccggcatgcagaccgatggaagaggctagtggtctgctgggaagggaggtggcccgcgtagcgtcccctccctcgctgagcctcagccacccctcccagggatggtgcgcccccaacatggtccggagatacacccagctaccaattcgggaccaggaccaacaggaccggacccgcctccctggacctcggacctgatgaggccacgacccctgcgcttctctcctccccctgtccctcccacctgtgctcaaaataaacctctggactgaccggctaagttctggtgcagtcagtgagcgcgcaacgtgcggggtgggggataggtggggaggcttggggagaaagctgggagcaggacttggggggtattcctgagaaatcgtgacttacaggggtggagcctggggacggggcccatatgcccatatacccgtgtgcactcccaggccatgggagactgtagggcgttttgtctcaaacagaaagcgacacccggccgggcgcggtggctcccgcctgtaatcccagcacattgggaggccgaggtgggtggatcacttgaggtcaggagttccagaccagcgtggccgacatggtgaaaccccgtccctactaaaaaaagtaacaaaaaaagaattagcagggcgtagtggcgcgtgcttataatcccagctgctggggaggctgaggcaggagaatcgcttgaacccaggaggcagaggttgcagtgagccgagatcgcgccattgcactgcagcctgggcaacaagagcaaaaatctgtctaaaaaaaaaaaaaaagcggcacccaaccccacaagcgtaagtttaaaataaaccttccccctccctcctctccttacccggacacctgcccatctgcctcctgcgatctttctcaagccaggccttctccgctctccattacccccgcccggaccctgccctagctccgcttcgaccttctgcctctgctccagttccctcctggtctggacttcgccctcctcttagattgtcagtctagtctagagctccttaaatccctcctgcccgagctccactctaccttacacagacaagagtgggactatcagccccagtctacagaggaggaaactgaggctcggcaaggctaaatcacttgcccaaagtccccaggcctgtctgaccccagagcccaggctcttgaccgactggatcttcggacttgacctttcggccagaacccacccctctgcgagaagcaaagcacacagtagtagcttcatgagttagtccagcaacagagggagggcatgggatccaaggtgtcgtctccacttcatgaatgagataaagtgcaggctgagggtctccttcgccccgccccagttccggtgccgatctccccttcacttccattggggcggttccccgggcctccaaacgcgaagccacgcccccacgcgcgtccgcctccgcgcggttctttctgacctcggcggcccccgtagctccgcccatcggagaagcgaccttacagcgcctgcctctttctgagcggcatgaagccacctcccaggcggcgagcggccccggcgcgctatctgggcgaggtgaccggtcccgcgacctggagcgctcgcgagaagcggcagctagtgcgactcctgcaggcgcggcagggccagccggagccggacgccaccgagctggcccgggagctgcggggccggagcgaggctgaggtgagatgcggttctcgggaccggagccaggctggaggcggggctggggtggggcggagagtgggcggggctgcggcaggagccagcggggcggggccaggaatgtaagcgagcgggggcgtggcgtggggctgagtggcggggcgttagtgggtgagcctgggcggggtgaggggcggggcgtggacgggaagagaagacctaggggcggggcgagcttgggagctagacgtgggcggggcataagtgaagcggaggggcggggcgatgccgggggcggggcgtgcgtgccgctgaggtttggagagtgggtgggtgagtttgaggggcaggacgagcctgggggcggggcgtgggcgggttaatagcaagacttaagggcggggccgttttgggagtaaggcgtgggaggggcgtgggcgggatgagggcaagctttaaaggcggggcgagcctcggggtaatgcgtgggtgaggcgagggctaaacgggcggaatgaactgggagtaagatgctgccgagtccgggcgaaaagcaacgcatgctgttggacaggatacgagcttgaagtgagagggaatagagaagaggggacgaagaagggagttgaacggggtagtagtcagcatagggttgggccctggctgcgtgaaggagccggaactggcctgggccttacaacttccttaggtagctggtcacgctctgggtggggtaggggccttggcagtcactgggactcctaacaccgggccagcaggagactaaggcgcagtagcggggcccagagcatacaagggattgggctttggcttctctgctgcagccctgagctcatagaagcctcattccgccgcctctttcctttctagatccgggtcttcctccagcagctcaagggccgcgtagcccgggaggccattcagaaagtgcatccgggtggccttcagggaccaaggcgccgggaggcacagcccccagcccccatagaggtgaggcagatgaacagggtgaggctgtccagggcaggtccctggtgggtaggtgggagttgcgggggataacctgattaggggatccccaggaggagcagggcttggggggccattgcaggctgatccctgggctgaccctgtacctctggcttcactcaggtctggacggatctggctgagaagataacagggccactggaagaagccctggcagtggctttctcgcaggtaccgccattcccccaggcaggtcagggtgtcccagaggacagggtcacatgggccaaatcatgtgaacctgggtcctgggcccttttgccagctctgtggactccgtcagtcactggacacctcgagcctcagtgtccctggctctgaggccatctcttgtctgaggagcatcttagggtggcagggaggatgggggaatgtgtagacggtgagaagacttcccagctcctcttcctccctgattgttctgcctgccaggtgctcaccatcgcggccacggaaccggtcaccctcctgcactccaagccccccaagcccacgcaggcccgtggaaagcctttgctcctgagcgcccctggaggacaggaagaccccgcccctgaaatacctagctctgcccctgctgcacctagctccgcacccaggactcctgaccctgcccctgagaaaccttctgagtcgtcggctggtccctccactgaagaagactttgctgtggactttgagaagatctacaagtacttgtcctctgtctcccgaagtggccgcagccccgagctctcagcagctggtgagaagggtgagggagggggcaggagcagagggatcaagggtccctggcagcaggcaggggtgtccccttacccctctcctccatccatcactagagtccgctgtggtcctcgacctgctcatgtcacttccagaggagctgccactcctgccctgcacagccctggttgagcatatgacggagacgtacctacgcctgacagccccccagcccattcccgctggagggagcctggggcctgcagcagaaggggatggggctggctccaaggcaccagaggagacccccccagccaccgagaaggccgagcacagcgaactgaaatcgccttggcaagcagctgggatctgtcccctgaacccgttcctggtgcccctggagcttctgggtcgggcagccacccctgccaggtgaggggcatggcgggcaggaggccacaccaggccccccgccctgcccctcggttctgctcggctggccctggctctttctgaggatcccgtcatgggggaaggtccttgagatgatgctcagctgtggggcgggcctctaagatgccccatactttgggggtctcagaaatggaacccccgttgtacaggggttgggtgggggttgcaggactccactcacaagcctcctgatgtcaaggacaggcggacagggctggcctcccccagtccccaagccccactgtgccttgttgtctgctggggggccatagctggcactgcccaccgtaaaggccctcgcacattttcccccttcctgtacacctcggggccagcatcctcaccttcttcaactgaccagtcgtggttactccctgctgccaggtccttccccttcccgggggtattctgtgaccatgaataaagttatcattctctttctctttcacctgtgacttaaagatggaagtgggggccctgaagtgtcagagcttgggggtcacagggctgggggtgtgtgccagggaggagagctgccacctgactggtgtgatgaggcctggggtgaggagccccttggtgactgtgaagctgacaagtgtggatggggagagccggcagggcaccttggggacaggcgtcagggatgggtttcagagtagggcaaaatcacatcgcacaggtggaggggagaaggcagcagagagtgggggtgacccggtggaaggagttgagccccaggctgggcggttagaggaagatagataggggtgggctgccccgagtggcaggaggctagtgggagtggagtgtcccctggggtggctttgggacctcaaggatccctagaaggcggggagggaggggtactggagtcagggctgaccccaaacccctgggggtgctgggaccccgcttgaggccccctccatcagcttcacctgccctgtgggtgtggaccgagggtcgggtcctagagagggaagcagatgtcctcccacggcaccgcgtcccacgcccagctagtaatccaagtcggtaaattctccgttctcggagcctgtgcattcacccagcctgccttttatagaaacgctcattcctccccccacacactgcacacggctcccctggggtgcacatctcttgggagggccttggagcacagccagcccactccgtccgtggtcaccgccccaccgcaccagacccacaaacgctgccaatggtggtgggcagggggaggaggcttaggctgcaggtacggtcggtcgtcggagcctccctccagggctggcagagggtgcgcctcccagttccccacagggctgagtctctctcaccacccccggcgcctccccagatcaacagaattgtgtgtggaggggaggcagctgggggttacacatcagcccccccccccaaagccggtgaaaggtgcttgtgatcttggtgtctttgcagccctgggaagctttaaaaacatgcaaaagccagacctgggttccacttccagccctaccagactctagccatgtgactgtgggcaagtcagtcactggagctgcctggccctcggtctcctggcctgtagaatagggatgctaacagggcctggctcattctcacgatcccgaagaggagacaggctataaacaggaggtgccaactcagcacgctacttggcatgcagtaagcgctcaataatagcttttattatcatgttcggctcagaggcagggaggagtggaacggcatgggagggctgcgggaggcacggcaggggggtcaggggcaagtggcaggagggcggatggggggcagcggtgggcaccggggcagggcgcgctgacctgtcctggggcccgggttgggggcagaaatgagcctgcccacgctgtcccgccacggcaggcgccacgcatcctcgacacagccgccatggcaggccttcgggctccgtctccgggacaggcggtgcagggcaaattggtatgcagcgtccgccccgtgggcccgggagagcctgccccgcagggaccagagcccaaggacgggctcaacactcagtcaaggtggggttgacgacggccagacaacaggggagggaggagggacaagggggtccccacttccagggacgcacaatagcagagccacttacacgctggggagggggcggtgcgggggtcctcctcccgcccgggattcagagtcgggggtgggggccagccgggcgggtgagatgcgcagagaggaagggacagggcggataaaggcacgaggtggggctccggccaggccaggaagggacatgggaggggtctcgagggggaggggctgggcttctcccaactccctccccctctcccccgggctgggggctccggggcgggatcctgagcgcagtcctggccccgcggcgccccccgccgggccggccctctgagaccccggcgcagggccggctagggggcgccgcgcccctcacaccaacgcgtagtcgaactgcccgcgctcgagcgcctccttgtggtcggtccaggacgaggcgggcatgcggctgtaggggtcgagcaggatgcgcacgcagcgcaccatcaacagcaccagcaccacgagcaggcagagcacgaaggcgaacaccgtgcgctgctccgcgtccaggcccgcgcccaccgggggccccgtcgacggcggcaggggctccggcgacagcgtccacgtcgcgctcatggctcacatcgccgcgcgccctgcggaggaggggacccgccccgggcgccggggatgaggctgcgccctccctcccgcgcctcctccgcttcgccccctcctgccgccgccgccgccgcctcccttaacgtgcccgaccccatcccccgcccgcgcctcggtccccgggctacgcccatgcccggcccgccggatcgccgccaccaccacgcggggacccaactctggccgtgcgcgcaggtgggggcgctgagagccgggaaacggagccgcgcccggcctgggccgcacacaacaggtgcgaaagcgcggccgcggcccgggcgcgcggcgtggggacggtccccgcggcccctgcccccgctccctttgttctcggcggcctgggaccccctcccccaccgcccccgccccggcgcgcccctcaccctggcttcgacccggacggggaccgaccgcccggcggccgcgctctctcagggacccgcgccggctgcgcgttcggcctctccccggcggcggcggcggcggcccgggctccggctcagcccaccccacccgcccctggagcggcggagaccgaggcaggcaagcagcgcgcgagccgggccgccgcggctgttcctatggcgacgggggcggggccgccgcggggggcggggctgcagggggcggaggctgcgcagggagcggcgcgcgagccagcgaccccgcccgggcctgcgggaggacggaaccccagccccgaggacccgcgagcacccacgacctcgccggggagtgggcagctgccactcccacctcccctggcacttcgggccccccagcctgccctgtgcctgcattctcctccgcgatagaccccactcgagactccctgtttgtggggggacctcagtggccctaaaacactcatatgggcactcaagctcccccggccctggggacctcaattctcagagagctcaggcaggtcactgggatgagtaagtccccctagttttgtctgtcactggcctcgtcttccaactcagggtccagccctgggcaaggcgtccacccactgcggctgcagttcctcactcgaccttgaccgcctcccacagcagccgcctgctcccacccccaccatcgcctcggccactcccgcgccagagaagacacttcagactccgtagctgctcttctgcaattcggtgttttattctttccaaatctcaggcttatgcacaagatggaagagcactgttaaaattaaaaaatggacctaaagtggcttggctgacgtggctagcgggccactgagccgcgggtcccgggtcccaccctgctgtggggggagtccctgggccctggggcctcttggcactgtgtgacctgtgtgcaccccaggtgaccaggcgccgggacccctgcagggcagagcaacagggcaggggttggccctgcgggggagtgtctccagctgccgcgcacccgcaacagcccgttgtcccctcccgggccagctggtcttgcagccgtcctggcagagctgggggcagagcccgcagtcttgttcccagaggtctggagttgccgcaggtggtgttgcggtgcctctgtgcctgatgacccaggccggggctacctggctccggcaccacactcagagaatctgctcggtgctggaggccgagatgtccaggagccgccaggccgcgtaggggttgagctcgtcctggtctcggcagagcgcccacacgtacagcatccgcagcaccttgtcctgcagggtggggtgggaagggcactgttgagagggttgaggtgacccaggcagctctgggggggggccaggctctgtggggcaggagccaccggcaacttccccaggggctgggagcagaggccagcacaattgcctagactcaggaaccactcagccttggtaaaaacagacaggtctgctggtctccgacctccctcaaccccaaactctggcccagaggtttctccacatccccacccagtcccagagcttcagggctctgagctggggtctctgccaggtggccacacacagatcttggggacaggcggtgtcatgtgcctgccccatcccactccctcactcaccgggtcaccctccaccacctcgcctttggggttcctgaccaccatcaccagctgtgcctggaaggtgatgatcagcaccggcccctgctccatcatcttgcccatggccagctgcagaggggccgagaggggggatgtgcctcagaggacagcccggctgctcccctggaggtgaaacccctgcgcctaggccctgctaggagaaggctccagcaccaggcccagcaccggtccctccccgtgggccttgcctctcaggccaggaccaggcctccctcgagaccctccccttggacaagcccaagacctcttggatcagcccatggcccccagcccctggcaaggccacctcctgggccttgtctgggccatagttcccacccccgatggtggcccgggcccccactgcgaggtgcttacgtcgacgttgtcaatgtctaggatgcgagaatggaactggagacccagtgccttggcctgctggatggggtgggccagctggctgtaagtctgcaatgagaggccgacacgcctgcgtgatgccacccagggtgggcaccacgccacacagagctgctgcccacacaccctggcgcccaggtgccctgccgccagccagcaatggcagaggccaagaacccaggtccaagtggggaggcaggtgccacccacttactggcccagatcacacgcttcccactcctgggaacaacactctatccagatgacccaatgaaaacaggattaatcagcaaagtgggtgattctcttggaacaaaatcccaaatctactcccagggctaagctggcggccccttggctgatctttaatacttccatattcgccgcactctgaatcttggcctgagatcaaacgcctcttctaggatctgtcctcagcctgaggctgcctctgtcactgaccagcccccagtgtcaccctcaaccccctgcgcctgtgccaggcacaggaagcagcccccgagacacgttttcgctggaggtttctctgggcttggcatgaaaccatgagagaaaagatgttctgatagcatctactttttatggaaatgactgatccgcggaggggagagaaaaaaaaaacagagccaatcctacttgttcggtttcttaaaggtgacattttaaaaacacttctgtggacgtggctggaacttcagctgtgtttccagggcaccagcagctccctggcaaagcgagtcagctgtggcgtaatggtcccaaggtaaaaacaaaacaaaaaaccaaaaaaaaaaaaaaaaaaaaaaaaatccacatcgaaactcataaatgcctgctggattagtcaccatgcaggggagtatttaaaaagaaaatctgacatcttctcctctgctttttccaagttgtttatgagctgggtgcagaatagaattagccaagaacgattctggatcgcttaatacgaagaagccaggggaaagaaacacacaggtcggggagcgaatagggtgagatgaggtggcctgaggagatgagagctgggagccccacagggatggactcgggcagggacagggaggctgccagggatggggcagacagctagaccagaccccaggtacgcggtgctgctggtggcccccgaaccccaagctttgactctgagaagcagctgaggcctcatcaggacacagctccttcctggtgtgggaagactatcgatgttttgtttggatctatgtttcaggatcatgtcgtgaggacagctagaggctcccagggcctggggaggggcacccactgccgcaaccccatccgtgccccataggtggcggccccgggtcaccgatgaaagctcccccaactcttccaggggctgtttggttaccagggttacctctgtgggttccctctggcccggggccagcactgccctggtttctgtgatcacacttcattctcacgacccgtgggaggtgagcacagggactctgctctggcctgggaagtgggatgggtgacaccttcaaaccccacttgactcccagcccccccccagtcatgtgggagacccacactgtccctgacccccggccccagcctgcaccccaggccactgcagccacctgaaatagggcagtcggcccccagacacctcattttacttcatggctgcaaccacctctcctgggactctccttccctaaattattatttctttttttttaagacagtctcgctctgttgcccaggctggagtgcagtggtgcaatctcggctcactgcagcctccgcctcctgggttctagcgattctcctgcctcagcctcccgagtagctgggattacaggcgcccaccaccaggcctggctaatttttgtatttttagtagagacagggtttcaccatgttggccagactggtctcgaactcctgacctcaggtgatccgcccgcctcagcctcccaaggtgctgggatgacaggcgttagccaccgtgcccgacctatttccttagtgacagtgtcttgatctgtcacccaggctggagtgctgtgctgcgatgactcactgcagccttgacctcgtgagctcaagtgatcctcccacctcagcctccctaatagctgggacaacaggtgcctgcctccatgcttggctcttttttttttttttttttttttggagacagaatcttgctctgttgcccaggctgaagtgcagtggcgcgacctcagctcactgtaacctccacctcccggatttaagcaattctactgcctcagcctccccagtagctgggattacagacatgcaccagcatgcctggctaactttttattttagtagagatggggtttcaccatgttgcccaggctggtctcgaactcttgagctcaggcaatcgcctgccttggcatcccaaagtgctgggattacaggcatgagccaccgcaccctgccacttggctcattttaaatgtttttgtagagacgggatcttgctatgtttcccaggctagtcttgaatgcttgggctcaagcaatctcccgccttgggctgctgggattgaaagcataggccaccgtgcccagacctaaccaaaattattttaagattggagggaaaaaaaaggcccagtaaaattggcagctttgtgatctctcacaggcccaggggacacccccaaccagccatctcttagacaccagcccagagaaggattctccctaacaaagtttacagtctgggagcaaaggactggcgggtgacccggtgtccagcctgagagcccagatgtgtcacatgctgaggaatggaaaggggcagggggggatgtcaggctctcggagggtgagacgtgaggattcccccaccgggagcccaggtcctgcctgttgggagctaccccaacggagccaccgaagtggaacttctccatggtgattttttaggccttaaaaaaaaaaaaagaaaaagaaaggaagtactcacagcttcatagcaccagtctttgagaatgtcaagctctccagaaatcatggcctaaaaaggaagggaaaataagcaccagaacgagagtgggcttttcaggcagcaggcgaggtcctgggaacattctccagtggtgcggggtggggagtttcctcagacacccccggctgccacctgtggggcgcgggtggagctgtggcactgggtgtcccccccaggcccgtccctgctggtgtcagtgcctggctctggcctaggcacaggcggagggcggcctgcgggcgaccacccaggaggcaccccacagggggacccccctggaacctggtggaggaagagaaaggtggctggggacccagctttcagcctggtcaggaatccaagccagggagatgaggacccaactccggctcccgcagtgagcccatgtcctctgtccccccaggggaccacatttcggactgcaaggcccaccatgggaccggctgcctcctaactgctgggggcagcgagagggaggggtgggctgcagggggcgtgcctgggctgggagctgcttccacaggatcctggagcctgggccggatccgatgagggggagggaggtgcctggagcggggagaagagcgggaaggagccggatgctggtggtgaaagctgtgagcggcagggggcgggtggccagaacacttggcacccatcacccatcccggaaggcactgcggtgctcaggctgctgttttggggcatggcgcccatccgcaccacctcccagccctgcccgaagtggcgggaaggatacgggaaactggaggaggaagaggacgttgggcggaggccggcggggccaaggatggagagtcccatgaagggccttccagaggcctggcccgactgggccgaaggtgtccaggctcctcctgcatcctgggggctgcagagaggcagaggcagcagggaagacaagaggccaccaacctcagggagaggcttatagggggcaggctgcagcatgaccttgagcaagataccctcatctataagcccaacaagggtctggttgccagggacagcaccgtgagggaacctcacggctgcagctctgggtcagacgtggcctggggccagctctgatgtctgaagacagacgcccacttctcccaaggggtgaggggctccaggcacctgagacaatccctagcctccagcagctgctcccagcaacctcaaaggaacaacagcctcaggcaggaggagtgagggaaacagacctggaggtaccggaggtgccggtaaggcccaggaagggcttcgggcacagctcatggggcagctgcagccgggcaggagcccgtgtgcaaccagcctcctcagaaaacagcctcggcagcagagttccctggcagcacccagggtgccggctgcggcgggggaggtggtggagccaggacctgccgcctgggaggggtcctgggggtgtggcacccacctccaggacattggggatgatgtcgttctcgcactgtttcagaaaccggtccttgtcaaaggccgggtccacccggaggatctccgtgagcacctccgacatctctgtcttggagaacaggccccctgcagggagcagagccgggagttcggggggaaggccggggaccccgccccaccaccagcctgcgaggtccagggatgactcactcacccagcaagtcggtgaccttgtccgtaagggcccgggatgcccggatgaacgcgttgtcgctttcgtcatacttcatcttcatctcgaagaaccctgtggaagatggggtaggtgctggagaaggggccccttccagaaacacaaccctccctcacagcttctagaggctccctgtgacccctgcgggatccaccctgacacgggtggggtcagggaggggacggctgtggacctgcatcctcatctgtgcttggggaccgctgcctgcccacctacctggccaggcgcagaggcccctcagctgcggccctaatggggctgtgtaagttatgggccgccaccccactggctgttgctttcactacaaaggaaacacaggcctctagcagtcctcacaggacaagggacaggggcctgcggctcgtttcggggccctgactgtgcttatgagggagcacctggcttctggcggcagaatctacagccccaccatcatgtgaccgcaaagaagtgaccggcccactctgaccccgatctcctcctctgcaaaacggggctgtcttgtgcccaatgcagggggatcaccttgcggtccaccaactgcccgggacacagtcacctgccctccaagacaccttcactcacggttaaacaccacgttgttctccttgaagtccttccactgctggtaccacttggagtccttgtgcagcacgacccccagggcctccctggggaagagggtgggccctggggtgagcggcggcgccagggccaccctgtgccctcctgcggctgcaggcagggggcagtacaggacagcaggcagctgagacctcaaacctaggggctctgaggaccccgccctcacctctcaccctcaaattcgagggagccgggaaccttgggcagaaggcaaactcaagaaacggactcaggagggaaccattggtgggctcccgaaatggacagcagtgaaagctgcccaaaatgggggcagcgagggccacgggctggtacctactcgtttggctcaaacactttctcctccttgaacttatctcccgcaaactccgttctcttccggagtcgctggggcctccggtagggcccggtctgtcccaggacgctgtcgtcaatttccttcttcacggactccaccccctgcgagggaggcacagcggggctggggtgggtgtctgggttcggccgccccaggctgcatgccctagcccaggactgggctcacctgggagagggctctgaaggccgctgtcctgcccagcttctccccgcctttggataccgactcggccgactgcttggccgtcttggctgcttcctccacgccctccttgattttccggccgagatcacttttactgacttcgtgaaggctctactgagacagacacagagagggggcgttggcaccggccctggcggccggggggcggggcaggaggaatgaattcctgccggagagaagggcggatctggttccccgaggccggcagaggccttctgtgctcctgtggtacgcggcacccccagagccatgagcacaacggcacccccagagccacgagcacaccgccacccccagagccacgagcacaccggcacccccagagccatgagcacaccggcacccccagagccatgagcacaccgccacggcttccgggatgctggccctgggctctgggtgagacgctgggtctgctggcccctttccaaaatgggcaggagtcctctggagacccgggaactgcctggcagcaaggattcccaaggaggggaccccggggaaagaacggcggtgagggcgccccatgctgcgcaaagctggacagaacagacaaccgaggagagccgcagcaccccaggaatcctgcctcccgcctctaccctcgggagggggtggaagcggcccctctcctcctatttttaggcaggaaaaacattttcatgttctcctcgagtcctggctagcagcacttactgctgccgactccctgggtcaacggtcatgcaaggttgccagtctgacctcaccctgcatgtgccgggaactcctgaaaccttcccgagggtggcagcacgccccatgccacccactgctgccaagccacccccacccaggagccgactcttcctccagcctccagcggccaggggactttgatggccccagcggctccaggcgggcgtggaactgttacctccttcacggtgcccgtcagctccccaagcttcttccgtagcacctcgctcgtccgcacggtttctgactcgatggttttctaggtaaagagcgctgtgtccttttttttttttttttttttgagacaatgtctccgttgccgaggctggagtacagtggcacgctctcggctcactgcaacttcctcctgccagattcaagcgattttcctgccccagcctcccgagtagctgggactacagggcccaccaccatgcctggctaatttttgtattttcagtagagacagggttttaccacgttggccaggctggtctcaaacttctgacctcaagtgatccacccgcctcggcctcccaaagtgctgggattataggtgtgagccactgtgcctggccaaccgttgtgtctttaagtctgtatgttctgacacggcagtgacatttctcttacagccaaaggtccaagaagcatcttctccgcagcccctccctccccgcacctgccagcatgtgctgcctccagggcccccggctgcccacatggcttggattgagggtctcagcagcggtgagctccttgctcagaaggccggcagactcgggtccccgcttggcagctacctcctgagaacaggaggcccagccttcacctttcaccgggtggtaggaggtggccttgcctgtcatcactgtgcccctcatccagcctccagccaccacagcttggtcttatgtctcccgctccatccatcccactccaaactcagcctgctatgtcttcagatgacccctgcattaatgataaagaggggctgggcatgtgagctgtagtcccagctctttgggaagctgagatgggaggatcgcttgagcccagagagttcgagaccagcacaggcaacatggcgagaccctgtctctagaaatataaaaaaattagccaggcgtggtatcccatgcctttagtcacagctactcaggaggctgaggtgggagaatcacctgaacatgggaaggtcaaaactgcagtgagctgtgatcacaccactgcactccagccagggtgacagagcaagaccctgtctcaaaaaaccaaactaggctgggcacggtggctcatgcctgtaatcccagcactctgggaggccaaggcggatggatcacctgaggtcaggagttcaacaccagcctggccaaagtgatgaaaccccgtctccactaaaaatacaaaaattagcctggcgtggtggtgggcgcctataattccagctatttggaaggctgaggcaggagaatcgcttgaacccagggaggcggaggttgcagtgagccgagatcgcaccattgcactccagcctggctgacagagcaagactccatctcaaaggagaaaaacaaaaaacgaacaaacaaaaaaacacaaatgaaaccaaaccaaaccaaaatgcaagggacccgtggcaggtgcctgcatctctgaggctcagctgctcattggtaaaatggggacactgtaactgcctcgcagggcccttacaaataaaggaatgcagagccattcccagaagccagggcttggcagctgctcaagaagagaagtgacaattaataatgacaggctgggagcagtggctcacacctgtaatcccagcactttgggaagctgagacgggcagatcacttgaggccaggagtttgagaccagcctggccaacatggtgaaaccccgtctctataaaaagatatatagggctgggcgcactggctcacacctgtaatctcagcactttggaaggccaaggcaggtggatcatttgaggtcaggagttcaaggccagcctggccaacatggtgaaaccctgtctttactaaaaatacaaaaattagctgggcagtagtggtgtgtgtctgtaatcccagctactcgggaggctgaggcaggagaatcgcttgagcctaggaggcagaggttgtgttgagccaaaatcgtaccactgcactccagcctgggcaatggagtaagactctgcttcaaaaaacaacaacaacaacaacaacaaatcagctgggtgtggtggcgggcgcctgtaatcccagctatccgggaggctgaggcaggagaatcaggagctggaggttgcagtgagccaaggtcacgccactgcactccagcctggatgacagagcaagactccatctcataaaataaaataaaataaaataaaataccagcaccatcacccagtttccaccaggctccactcagagggctacagctgggagctctcaggagcgctgcatcccatagctggtgtgcatgcgttgcctgggggcctgtgaagatgcgggcgctggcctggcagtttgggagggtgtgagcctctgcactgctcatccactcccaggaggagccactgctgctggtctggggaccacgcttcaagctgcacagaacgctgcatggtctcatggcagaacccagaggcctggagacccgcacctgtcccctggctccctctcattagtgcatcagagcagtgacctcacttcctcacgagccaccctgcccccaaccgtccagccctgagctcctctggctgtccctggcctggagaaaccctggccctggaaacaaacatgtcaaccaagaaaggtaagaagcaaaggggcccaacgcggtggctcacgcctgtaatcccagcactttggaaggctgaggcgggcggatcacttgaggtcaggagttcgagaccagcctggccaacatggtgaaacctcttcactactaaaaatacaaaaattagctgggcgtggtggtgcgcgcctgtaagcccagctactcaggaggctgaggcaggggaatcacttgaacctgggaggtggaggttgcagtgagccgagatcgcaccactactctccagcctgggtgagggaaaaaaaagcagcaaagaaactcacgtatttccttctggcctcctggagcacgtctgattcttctagccttctggcctcgtcacggaatttttttatactttctttcatttctttgtttttggctaattcttgtttgacattatctagcaagccggacagaaagccttttctgtttccagaagaatatgatttggactagaaagaatgtacaagaaaaaaaatttaaagaacatagtagaacatagaatgaaatgccccacagagggactcagggatttttttaaatgttctcttttcggttgatatacatttaatgatgattagctatctcttttataataatcataaaaaacaaagaaacagcaggtgataaaagtgtggtatatccagacaacagaatattattcagtgctgaaaaaaaaatgagctctcagccactttaggaggctgaggagggaggattgcttgaggtcatgagttttaagaccaacctgggcaacacagcaccctatttaaaaaacaggctgggcgcggtggttcacgcctgtaatcccagtactttgggaggctgaggcgggcagatcacctgaggtcaggagttcgagaccagcctggccaaaatggtgaaacctcatctctactaaaaatgcaaaagttagctgcgcatggtggtgtgtgcctttagtcccagctcctcagaaggctgaggcacaagaattgcttgaacccaggaggaagaggctgcagtgagccaagattatgccacagcactccagtctgggtgacagagcgagactccatctcaaataaaataaaataaaataatttaaaaaacaagcaagaaatatgctctcaagctgtgaaaagacacagaggaaccttaaatgtatattgcactaagtgaaagaagccaatctgaaaaggctacatactgtctgattccaactatagaccgttctggaaaaggcaaaactaaggggacagtaaaagatcagtggttgccaggggtttggtaggaagagggtgagatgagtaggggggaacacagaaaaatgttagggcagtgaaactactcttatgatactgtaatcacagagaatgtacaccaccaagagggaaccggaaggtaaaccatgcatttattaataataatgtatcaacatcctgtcaattgtgacagatgctccacactaatgcaggacgtgaagaatagaaaactgtgtgccagatgggagaggaggggcatggcaactctttggacattctgttggatttttctgtaaacctaaaactgctcaaaagataaagccttgtgaaagcaaaacaaggccgggcgcagtggctcctgcctgtaatctcagcactttgggaggccaaggtgggtggatcacttgaggtcaggagttccagaccagcctgaccaacatagtgaaacccccgtctctactaaaaatacaaaaattagctgggcgtggtggtgggtgcctgtaatgccagctactcaggaggctgaggcaggagaatcacttgaacccaggagccggaggttgcagtgagccaagattgtgccactgcactccagcctgggtgatggaatgagactccatctcaaaaaaaaaaaaaaaaaagcaggctggacacagtggctcatatctgtaatcctagcactttgggagaccgaggtgggcggatcacttgaggccaggagtccgagacaagcctggccaacatggtgaaaccttgtctctactaaaaatacaaaaattagccaggtgtggcggcgcctgcctgtagtcccagctactgaggcagaggcaggagaactgcttgaactcgggaggtggaggttgcagtgagcggtatctcgcccctgcactccagcctgggcgacagagtgagactctgtttcaaaaaaacaacagagaaacagtttaatgaatgatcatacaataatccaatcaggcggaaggggccgcctgtggtcaacttttccacagctgtgttgggtataccagctccaggtgggatccccctccctggctcctgtcaagctacaagagaaagctgcatccagcctggtgctcaggccccgtggagtcacacacctgtggtcccagctactcagaaggctgaggtgggaggatcgcttaagcccaggagttcaaggctgcagtgagccgtgatagtgccactgcaccccagcctgggccacagagtgagaccctatcttaaaaaaaaaaaaaagcccagtgctgctccccaggacaggtggccaggcctcctgtcagcaggctgcagtcccattcagatgccaccctggccagcctttctccaggggaaacccaggttctaagtaaaatcatccaggaccacacaaccttatcgcagccctaccagagactcttgggctacaaaccatgggagtgagtgtgtggcgggggactagacaagaaagggaaagagtcacaggtcctgtcccacacccacgatggccccaggacaggactggagaggtaggtagctgcctccaaggaggcagctgagctgaggctctgggcgcagagagagagggagacagaatgtacgcgctgcccgaatgtacaggtctggggaagggagtcaggttttgggcttctgtcctcacgatgctgagacaccaacagaagcacagttgaagaggaatgaccaggagaaactgaggtctggttgtgacaaggtgactctgtaccaatgatcaaagggctatcttctagaaaaggaaacagctatgcttggtgaggtacccacgggcagaggtcacagggaagtagaattcagttcaatacaggggtctcttccaagcattagagccaacataaagggctattctgacagcaccttatccccttacgacatcaagcaagaggcaggtcaagtgtttctgggaccgagaaggccaggcacactgggatctgtcattctgaaagccccggacacagaaggcccaccaccgagatggtacgagccacctctacagccccacccctccctcctgccaatgggatctgaattttcgggcctcccctgtgtctgctggcccgagcatcctgagtcactcaccagtggcagctctccgcccggccggcgcatctgataggtcgacccatggggtaggttgtggctggaaagaaattggattccactgccgaggcatctctaattggggggagagaagagaaagatccattctaacaagaggttgactgagaagtaagcagaccacacacaaaacagcagggtcacctgcaactcactggccattttttttttttttttgagacggagtctcaggctagagtgcagtgctgcgatctcagctccctgcaacctatgcctcctgggttcaagcgattctcctgcctcagtctcccgagtagctggaattacaggtatgcgccatcacatccggctaatatttgtatttttaggagagaagcggttttgccatgttggccaggctggtctcgaactcctgacctcaggtgatccacccctcccccggttttccaaagtgctgggattacaggcatgagccactgcacctggcctcactggccaatttgtatcttatgcctgatgcatgccgggcactctgtaatcttcccaaagtctgagaagcaagcagaagctggtggaaagagaaaatgctgtgtctgtacctccagggcctacatctatcctcgtgcccctgaaactgggggaaaacggacaggtcccaggaaatgccaacccatggggggaagaaggctaaatgtacaatttaatcccttagtctgaaagtaggcactctaagcttctatgctagtggcaagcagtcttctcttgcgagcccaccccatttctgccagcctccaaagatgagagaactggatttttcagacacaaacatcgataatgtgttgccccagggacaactctggaataaacctacaatgtcctcctcaagggttgagctataaacagagtaatttaggggagtcgctctgggcaaagactgggctgatctcatgtaaaaggcacttgctggctgggcgcggtggctcacgccagtaatcccaacacgttgggaggctgaggtgggaggatcacccggtcaggagttcgagatcagcctggccaacatggtgaaatcccgtctctaccaaaaatacaaaaattagccgggcgtggtggcacacacctgtagtcccacacacctgtagtattgcttaaacccgggaggtggagggtgcagtgagccgagatcttgccttaagttctgtgcaggcactgagctggtggctcatgcctgtaatcccgatactttgggaggctgaggcggaaggatcgtttgagctcaggagtttgagaccagcctgggcaacatagctagaccctgcctccataaaaaattgggggaaaaaaaaaaagctctgtgcaggtcctgttcagctcggcaccctgtcacccagcacagaacctggcgtgttgatgtcaaaagaccaggtacaacttctccaccatttccacatttcctgggccgtttttctctctgttctctgcctcctacctctgagaaccctatgcaacatcccaaacttacacaggtgcctactatctcctgtatttacttgaggataacttttttttttttttttgagacggagtctccctctgttgcccaggctggagtaaagtggcaggatctcggctcactgcaatctccgcctgccgggttcaagtgattctcctgcctcagcctcccaagtagttgggattacaggagcgcgccaccatgcccggctaatttttttgtatttttagtacagatggggttttagtagagatgggatttcaccatgtgggccagtggatctcgaactcctgacctcaggtgatccacctgaggctgaggcaggagaatcgcttgaacccggaggcagaaggaggcagaagttgcagtgagccgagatcgcgccattgcactccagactgggcgacaagagcgaaactctgtctcaaaaaaaaaaaaaaaagagaaaaaagaaaaaacgaagagcacgagcaatatgaagtactactttctgagtgcgccttacacgtcttgactgccactgccctgtggacccaagagcctgctagggcgcgaaccacctctcgcacatccacaatgaacgttagaagaaacgagacaagaaatgctctcggtagagaacttggcatttaaccgcgagctgtgaatttcacgtttttttgccttcccctctacttttttccacgggacgccgccgccccggctaccattctctctcctgtatacgtggagtctgatcagagggcgaagggtgatcagctccctcccaggtcccgcgcatcgccgccccctgcccggtaagctcggtccccgccctcaggccacgctctgtgccccctgtcctggcctctgctacccaaagatctaaccccaagctttctaaggagcccaagcaagggtcgcgaaggccaagggtctgagaagaaagccttggtggccgaaggcccagaagacccctaagctcgccctgccagcgccgcaccgccgctcacccgtggacagcggcaccagccactccgcagggccgccgccgccatgttggagaatcgtgtgaccttctcgcggcgcggcccggttgcgtcatccgccgcttcggcctagagccgcgcaagcctgagaaaagccgctccaggagcggggtttcgggtagggagagccctccgattgggtccgtcatagggcggggcattaaaagggtagggaatgcctagagagcttgacctctgatagggcagtgttttggaaggacggggcccgtgactggatgtggcccgggggagggcactcctgggagggtcagatctgtgattgggcgcgactacgagggggcggagcccaggggcgtgtattccgtcacttgcggtgattcggctacagaacgcgccgggcgctggtggcaggtggtacaggcacgtggatccaccgaccacaaggacggattcgattggattctgattgaccggcggaccagctccagagtaattgtctatggctgcccctgcaatgactgattgattgacaatggctgagagaccagcaagtgagtcgctccgagaaagcgaaggagcccactcttgtgcggcgctttgggaagacgcctgttggttttgaccccgaataagaagaggaagctgagagcgggctgactgtggtccagtcctacttcgattcagtgtgaactgacactctgatctgaagacgctcaggcctttgtcatttcagcaccccagatgctattttccattcgaagaatgccgccaccaggtggcggtattttaacatggccatgcaatccgggtatgaggaggagggttggtcccctgggagagctaatgtatgttgctgttgctgtttgtcttattggatccttttttttttttatagagccagaggcttgctctgtcacccaggctagagtgcagtgtcgtaatctagctcactgcagcctccaattcccaagctcaagcgatcctcctgcctcagcctctgagtcactgggattacaggcgtgagctaccgcacccggtctttttgcattactaacctgtgatatgggtttatgggacttcattatttcaaagggaggcagcttggccccggagagcatgcattcctggcttctgcgatggatagacttgtgttctccatctcaggagctccccctcaaggtgggggtaagagatgagggcttccactctggctttgttcgagatgtcttgatgccaagaggagcaaactagttaagcggttggtgtacacaggtgtgttgctaagaataaggtctgggctagaaatatggattcttagttgtggttgaaagtacggagtttggccgggcgcggtggctcatgcctataatcccagcactttgggacactgaggcgggaggatctctccagcccaagagtttgagaccagcctgggcaacatagtgaagacctcttctttacaacaaatacaaaacattagcttggcgtggtagcatgtgcttgtagtcccagctactcaggaggctgagatgggaggatcgttgaggcccgggaagttaaggctgtagtgagccgtgatcgtgccactacactacactacactacactacactacctgggcaacagagagagaccttgtgtcaaaaaaaaagaagaagaaagaaagagagagagagaaaggaaagaaagaaaactacagcattggacactcagaggcagtgtgtcatataagcatgtcaaagacccaaagataaagtggagatagaagactcctttaagccaggatccgtggctcagtcctattatcccagcaactcaggagcctgaggcaggagcatcatttgagcccaggagttacagaccagtctgggcaacataacgagaccctatctctacaaaaataaaaaaataagccaagcatggtgtctctcgcctggaattccagctacttaggaggctgaggtgggaggatctcttgagcccattagttagaggctgcagtgagctatgatcacccactgcactccaccctgggtgacagcatgagacctccatctctttttttgttgttttgagacagagtctcactctgtcgcccaggctggagtgcagtggcacgatcttggctcactgcaagctccgcctcccaggttcacaccattctcctgccttagcctcccgagtagctgggactacatgtgcctgccaccacacccagctaattttttgtatttttagtagagacagggtttcaccatgttagccaggatggactcgatttcctgacctcgtgatccgcttgcctcggcctcccaaagtgctgggattacaggcgtgagccaccacacccggcctttttttttttgagatggagttttactcttgttgcgcaggctggagtgcaatggcgcgatcttggctcaccgcagcctctgcttcccaggttcaagtgattctcctgcctcagcctcccaagtagctgggattacaggcatgtgccaccacacccagctaattttgtgttcttagtagagacggggtttctccatattggtcaggctggtctcgaactcctgaacctcaggtgatcctcccacctcagcctcccaaaatgctgggattacaggcatgagccaccatgccccctcgagacctccatctctaaaaaacaattttttgttgttgtcgttgttttgagactgagtctcagtctgtcacccaggctggagtgcagtggcgtgatctcggctcactgcaagctccacctcccaggttcatggcattctcctgcctcagcctcccgagtagctgggactacaggcgcccgccaccatacccggataatttttgtatttttagtagagacggggtttcaccatcttggccgtgctagtctcgagtcctgacctcgtgatccacctgccttggcctcccaaattgctgggattacaggcgtgtgccactgcgctcagcactgtgggaggccgagatgggcaaatcatgaggtcaggggatcaagaccatcctggctaacatggtgaacccccatctctactaaaaatacaaaaaattagccgggcgtggtggcaagtgcctgtagtcccaactacttgggaagctgaggcaggagaatcgcttggacccaagaggtggaggttacagtgagctgagatcacaccactgcactccagcctgggcgacagagcaagactccatcaaaaaaaaaaaaaaaaaggaagacaatctggaggaacttggagaaggcagatggaaacagcagaggcgagtgctgcacagttcaggcaaggcaaggacagaaatgtagccaccgccattgcattttgcaatatggaggtcattggtgagataagcaagaggggttttgggtgagtggtgggcctgggagccagatttcagtgagtggagatggttttacagaggcatgctggggccagcttgcactgactcgcaagagccagccggcacatcttcaagaattcaaagcctcttgttaaacatggccaatatgtaaacaattaattgtataaacttaagatcaaatagattatattagaacaaaagtaataatgcaaaattcatcacttcctaattatgctgctacatgttactactatctgtgctcttgagggtttttgtttttgttttgagacagtctcactctatcgcccagataggagtgcagtggcaccagcacggctcactgtagcctcgaccttccaggctcaagtgatcctcccacctcagcctcccgagtagctgggactacagacatgcaccatcacgcccagctgatttttgtatttttttgtagagacagggtctctctacgttgcacgggctgatctcgaactcctgggctcaagcgatcctcccaccttgacctcccaaagtgctgggatgaccagcacaagccacagagcctggctactttttaaaattttttgtagagacaggctgggtgcagtggctcacacctataatcccagcactttgggaggccgaggtgggtggatcactttaggccaggagtttgagaccagcccagccaatatggtgaaaccccgtctctattaaaaatacaaaaattagccagatgtggtggtgcatgcctgtaatcccagctactcagaagggaggctgaggcagcagaattgcttgaacctgggaggcagaggttgcagtgagccaagattgcaccactgcattctagcctgagtgacacagcgagactctgtctcaaataagtaaataaataatctttttgtagagacagagtcttgctatgttgcctaggctggtctcaaacccctgggctcactcgatcctcccacctcggcctcccaaagtgctggggttacaggcatgagccactgcacctggcttatcttggggttatttacatatatgatgtctgcgtgctggaaatactatattatgtgagtcactgcattgtgtaccagttctgtttgatgatgccatctttgtagcttgaaatcacctacaagcagatcagccacaagtggtgggagtatttacaccacaggaattggcagacattccaagtcaggagctctttggttggtttgtttctctggtgagccagttattaaacatttcaccagcacagcggtggttgagaatactgggacacagaacacagactcttcccaggaatattcactgtgcacagaaggtgaaatgatggcagctggaagaacatatgggaaggagcgagagtgctttgttttccccaactttttattttgcaaaatttcaaagctacaaaaaaaaaattgcaagaatagtatacgaggctgggcacggtggctcacacctgtaatctctgcactttgggaggccgagatgggcggatcatctgtggtcaggagttcgagaccagtctagccaacatggtgaaactgcgtctctacaaacaaaacaaaacaaaacaaaaaaacaaaaacaaaaattagccgggcatggtggcgcacgtctgtaacccagccactcgggaggctgaggcagaagactcacttgagcccaggaggtggaggttgcagtgacccaggatcctgccactgctctccagcctgggtgacagagtgagactccatctcaaaaaaattttaaaaatattggctaggcgcagtggctcacgcctgtaatcccagcactttgggaggccgaggcgggcggatcacgaggtcaggagatcaagaccatcctggctaacacggtgaaaccccatctctactaaaaatacaaaaattagccaggcatggtggcaggcgcctgtggtcccagctactcgggaggctgaggcaggagaatggcgtgaacccgggaggcagagcttgcagtgagccaagatcgcgccactgcactccagcctgggcaacagagcaagactctgtctcagaaaaaaaaaaaaaaaaagatcaaatgtttagccaaccaaaattagtttaaattatacaacccgaccccagccaataaaaaagggtacaaaaacaaaacttgcatcaaaaataaaggctctcgtgcccctttgttcaagtatactcataacaactggccaaaaaaacacccccctgcacaaaaataaattactttgctaaaaattcttcgttcaagtgttcaatttccttaaaattttaagcgttattcctaacagtttgcactcctatgagaatctaatgccgctgctgatcttacaggaggctccagtgatggggagcggctgtaaatacagatgaagctttgctgcctgcctgctcactgcctgcctgctcacctcctgctctgcggcccagttcctaacaggccacagacaggtaccagtctatggcccagatgatgcagacccctgtcttaaacaaaaacaaaaaaccaaagcacacttaatgtgagatctactctcttagcaaaatttttgtttttgttgtcgttgacacggagcctcattctgttgcccaggctggagtgcagtggcgcgatctcggcttactgcaacctccttctcccgggttccagcgattctcctgcctcagcctcccgagtaactgggattataggcaaccaccaccacgcctggctaatttttgtatttttagtagagatggggtttccccatgttggtcaggctggtcttgaactcctgaccttgggtgatccacccacctcggcctcccaaagtgctggggttacaggcgtgagccaccgtgcccggctactgtgatgtgattattatacatcgtatgcctgtatcaacatatgtcctgtagaccataagtatatacacctactacgtacccactaaaattaaaaataggcagggcacggtggctcacacctgtaatcccagtactttgggaggattgcttgaacccaggagttcgagaatagcctgggcaacacagtgaaactccgtctctacaaaaaaaaaacacaaaaaaattagccaggtgtggtagagagtggctgttggtcccagctactcaggaggctgaggtgggaggattgcttgagcccaggagtgagaggctgcagtgattgcaccactgcactccaggtaactaaagtacaatggggccgggtgtggtggcccttgcctgtaatcccagcactttgggaggctaaggtgggtggatcgcttgacgtcaggagttcaaggccagcctggccaacatggttaaaacgtgtctctactaaaaatacaaaaattagccgggtgtggtggcgggtgtccgtagtcccagctactcgggaggctgagtcaggagaatcacttgaacctggaaagcggaggttgcagtaagcttagatcgcaccactgcactccagcctcagcaacagagagagactccgtctcaaaaaacaaaaatagaggccaggcacagtggctcacgcctgtaatcccagcacgttgggaggctgaggcgggtggatcaagaggtcaggagatcaagaccatcgtggctaacacggtgaaaccccgtctttactaaaaacacaaaaaattagctgggcgtagtggcgggcacctgtagtcccagctactcgggaggctgaggcaggagaatggcatgaacccgggaggcggagcttgcagtgagccaagatcgcaccactgcactccagcctgggtaacagagtgagactctgtctcaaataaaaataaataagtaaaataaaagtataaataaataaataaatacattacaatgaggttattagggtatgagccctaatccagaaaaaccggtgtccttataagaagcagagattgggccgggtgcggtggctcacgtctgcaatcccagcactttgggaggctgaggcgggcgtatcactgaggttgggagttcgagaccagcctgagcaacacggagaaaccctgtctctactaaaaatacaaaattagctgggcgtggtggctcacgcctgtaatcccagctactcaggagtctgaggcaggagaattgcttgaactcaggaggcggaggttgcagtgagctgagatcgtgccattgcactccagcctgggtaacaagaggaaaactccatctcaaaaacaaacaaaacaaacaaatgaacaaacgaagcagagatcagccgggtgcggtggctcaaacttgtaatcccagcactttgggaggctgaggtgggcggatcacaaggtcaggagtacaagaccagcctggccaacatagtgaaaccccatctctactaaaagtacaaaaattagccgggcgtggtggcgggcgcctgtagtcccagctattctggaggctgaggcaggagaatcacttgaacctgggatatgtaggttgcagtgagccaagatcacgccactgcactccagctcgggtgacagagtgagactttgtcccctctgcaaaaaaggaagtggagattaggacacagatacacacagagggatgactgtgggaagacacgagaagacggccatctgcaagccaaggagagaggcctcagaagaaagagaccctgctgtcaccttgatctcaaacttccagcctccaggactgtgaggcaatgcatttctactacttaagccacgcggtctgggtgctctgttacctgcaggccgagcaaaccaatgcaggtgcccctcagcctcttccctctggctcccagcccccacccactcgcattggctgttgcgtgcaggcctctgccatctgtctgccttctgtctggcttcctttccacttctgtaccttctacccagcggactcctccatctccggttctccttctcgaggtataattatagctgctggcactagtgcctgtctcctctgtgccaaagtgtgttcctggccatcagaggccgtatcttattaacaccaacccggtaaccctgggaggcaggagctatcattagctctcttataccaaagcgatgcagcacccaaggcttccagagaggaagggggatgcccagggccacgcagctagcatgtaaaagataatctgtcacctgggcatggtggcacatgcctgtggtcccagctactcaggaagctgaagtgggaggagtgattgagcccaggcgttcgaggctacagtgggctgtgattgcaccatcgcactccagcctaggcgacagagggagaccctgtctcaaaaattaaaatagaagcccggcacggtggctcacgcctgtaatcccagcactttgggaggccgaggcaggtggatcacgaggtcaggagttcaagagcagcctggccaagatggtgaaaccccgtctctactaaaaatacaaaaattagctgggcgtggtggtgggtgcctgtagtcccagctcctcaggaggctgaggcagagaattgcttgaacccaggtggcggaggttgcagtgagccgagtttgtgacactgcattccagcctgggcaacagagtgagactgcgtgtcaaaaaaaaaaaaaaaaaaaagaattaaaatacagtaataaaataaaataaatagcagggtgtggtggcatatacctgtagtcccacgtactcaggaggctgaggtaggaggatcgcttgagcccgggaagtcaaggctgcagtgagctatgatgctgtccactctagcctgggtgacacagtgtgagacactgtctctaaaaaaattcaaaacgggctgtggccaaggcatcatttcctcctgcctggattcccgactttccggaggcccttagccctaccggggcagttcgggcatctctcctgagaggtcccaggtccattacaggctatttccacggtctcgacatccccagctctttgacgctggccactggccggccacgggctgtgggttgggggatccgtggctttcgctgaggacccgcaggcctgtctccatgaggcttgacttgatagaaactggcactggggcctgtcctgtcatacctccccttgtcaactgccccttcctaggtgcacccttcccccaatctcttatcctaggttctgtcaactggaaaggagcctgattcagtggccttgcccaggcctgcttcctctcctcccaccatgcgctggctctctcagctgcaatttcctctccttacccatgccccactcactccacgggccctcggccagctgccattccattcctcctacctctcctcctccacctcctcctccctctccttctcctcctcccccttctctctctcctcctcctcttcctccctctcctcctcctctctcctattcttcctccctcacctccttccccctcctcctccccctcctctcctcctcctcctccccctcctccccctcctctcctcctcctccttctcctcctcttcctccctctcctccttccccctcctcctccccctccccctcctctcctccttctccccctccttcctctcatccccctcctccctctcctccttccccctcctcctccttctctcctccccctcccctctccttcctctcctccccctcctccccatcctcctcttcctcttcctccaccatcccccagcattaacatccctcactgtaagaaaaccaaacagacaaaatgccatccttgcaatgaaggtgaaaggccacggtctacaagaagtcctaagatgaactgaaaaattctgagcggagactcgattgcatcaggtatttgggagagaattccccagccaggccttcagcagctaccgggagggaccctggggggaggaggctgccctggaggcggagggagtgcaggggaggttggcaggtgctcaagggcccccggcttgggttaatgctttctgttgccattttgaaattctttttctttttttgagacggaattttgctctgtcacccaggctggagtgcagtggtgcgatcttggctcattgcaacctctgcctctcaggttcaagtgattctcctgcctcagcctctcgagtagctgggattacaggcgcacgccaccagcctcccaagtagctgggattacaggcgcacaccaccacgcccagctaaatctttgtatttttagtagagaccaggtttcaccatgttggccaggctggtcttgaactcctgacctcatgatccacctgccttggcctcccaaagtgctgggattacaggcgtgagccaccacgcccagtaacaattttgaaattcttagtcatcttcgaccaacaggccctgcacatttttcctttccttttttttcttttctagctgattgcagcctcgaactcctgggctcaagtgatcctgttacctcagcctcccaagtagctgggaatacaggtgcatgtcaccactcccggcctttttttttttctttgagagagagtcttgttcttgttgcccaggctggaatgcaatggcgtgaactcgactcactgcaacctctgcctcccgagttcaagcgattctcctgcctcagcctcccaggtagctggggtttcaggcgcccgccaccacgctcggctaatttttgtatttttagtagagacggggtttcactatgttggccaggctggtcttgaactcctgacctcaggtgatctgcccatctcagcctcccaaagtgctgggattacaggcgtgagccactgtgcctggcttttttttttttttttttttaatagcgtcttgctctgtcacccaggctggagtgcagtgacatgatctgggctcactgcaccctccacctcccaggtttaagcgattctcctgcctcagcctcccaagtagctgggactacaggcacacaccaccacgcccagctaatttttgtatttttagtagagacagggtttcaccatgttgggcaggctggtctcgaactcctgacctcgggtgatctgcccacctcagcctcccaaagtgctgggattacaggtgtgaaccattgtgcccggcctcatttttacattttttatagagataggctctcatgatgttgcccaggctggttttgaactcctgagctcaggcgatcctccctcctcataccagttctcaggacaggttgctgagaactcctcaggctctgaggacactgaggtgggagggaaaccgcgctctccctgccccttgccccccagcgaaaacactctcatgtcagaactcggctattactaaacacaaacagtggttctccggacaacgcaggtgtctaggtttctccttctcttccagaaatccttttaaattgtgctaagaaattactgaggttgaaagacacacacaaagcccagggaaaaaaggatgcaggcctcagacccttgaccttgaagggagcaatggaaatagcccccccccagaggcgggggtccagaggggactggtggaactcgaacgtcccccacaacacacagggccctggcttggggctgggcctctcgggctctgaattctggggtgaggcggggatcgggagccgtctcttctccttggaggagctcggggggtggatttccttgcttggttgggggtggccgcaaggcctgtggtgagagcatggggggtgtccaggccccctggtgtctgatcctgagcccctgagccctgtctacccctgcaggtcatgcaggcagtactcagcctcctacccaccctcaactttccatccatgtctaaaccctgaaacagatagttcagaggcacaaaactaagggggcggccgaaagccaggatgctctacgccaaactaagaaaataatcaccagcacagcgtgttttccaatccgccaagttctgctgtgtcatctgtgaaataggtgcatgaacggtaaagtactgtgtaacgcaaaaagctaacattcactattgggtccttcctgttccaacgtcactcccttaagggccctgcccctgctgcccagagcgtccaggcattcagcacccctactgtgtggggcaggcgtgcccggtctgttctccctgctgcccagtgggtgggcccttctgggtggagtagaacatgtttaagcccttaacctgggaccagcgctccctcgtccacagggctgctgtgggacgtcaagatggtttcctggccaggtgaggtgggtggctcacacctgtgatcccagcactttgggaggccgaggtgggacaatcacctgagatcaggagttcgggaccagcctggccaatatggtgaaccccatctctactaaaaagacaaacaattagccgggcgtggtggtgtgcgcttgtaatcccagctactcgggaggctgaggcaggagaattgcttgaactggggaggtggaggttgcagtgagttgagatcgcgccactgaagtccagcctgggcgacagggcaagactccatctcaaaaaaaaaaaaaaaaaaaaaaaaaggcttcctgaagttgttgtggcagaggatcagggacagcagagggtgagattcgctgcgctcccccccaccccaataaaaacactctcatgtcacagcttggctctcgtatgactaaacacaaaccgtggttctccagacaacgcaggcatctgtttctccttctcttccagaaatccttttaaattgtgctaagaaattactgaggttgaaacacacacacgcaaaacccaaggacaaaaggatgcatgcctcagacccttgaccttgaagggagcaatgaaactagtccccatagaggcaggggtctggagaggtctggtggaacgcaagtgttgcctgccatgcacaggcgcctcactgggcctcttgggctctgaattctggggtgaggcagggatggaagccatccctggagcagaggtggagatgggggctgtcaggtttcattaaggttcgtcccacacaggggactcttctaaacttcttgcttctcacggtgagtctgacactggcgtcaccagggagaaatacaggttctcaggccaggcgccgtggctcacgcctgtactcccagcactttgggaggctgaggagggcagatcacctgaggtcaggagtttgaggccagcctggccaacatggtgaaaccccgtctctactaaaaatacaaaaattagccaggtggcgtgggcctgtaatcccagttgctcgggtggctgaagcagaattgcttgagcccagaaggtggaggttgtagtgagccgagatcgcggcagtgcactccagcctgggcaacagagcgagactctgtcaagaaagaaaagaaagaaagagagagagagagaaagagagaaagagagaaagagagaaagaaagaaagaaagaaagaaagaaagaaggaaggaaggaaggaaggaaggaaggaaggaaggaaggaagaaaggaaagaaagaaagaaagaaatgcagattcccaggcccacaccagacctgcagaagacgaatctgctttgaaatgatgctcccccatgggaggcagatgcattcttaagtttgggaggcgcagacgcccggaccctttctcctgggttcacaggtggggcggtcaggagatccattagcctgagccagtggagctgcccagaggccgcaggagccccagctgtcggcccctggggtctgaacacctgggggatggccccgagcgctgtcagggctctggctggagcacagccctggccctttggccccaggtggtgtcagacaacatgggtttttcctggaagccgagggatcatttagtcacgtctggaagagaaggtgatgaacacagacccacaagacacacaagcaatagagaaactagcaacttgaaaacgggctccgtaaatgctttccgagagaccgggctgcgggcccatgttagctcagctctctgggtgctgggcgcgaccatccagtccttggctgattcttggtagcaactgtcaccatccctacttgatctcattttcctgaggatctggagggggtgggcagcgtggacccatttcacagagggtagagcggagactcaagagagccagggactttcccctgggtggcacgctggggagtggtgtcagagccaggatttgaacctggactctctgaccttgagacccctaaccattcccatcccaaaggagacaaaggagatcagtctcacggaggggacactgaggatggccccagggctcgggagtgactatggttccacatacagacgagggaagaggcaggatccccgggtcactgttgggggagcactggtgtgggaagcagatggaggggggccatacccaggggccactcggtgggcccactgacctgtgaacctggagaagaggggcatctgggtgggagctgaagggccgtgggtcagccagcacagggcacacccgaactgggtgtcccctcgtgggctcccgggacctggcacaggcttacctcggagggaagaggtccccatcccctggcactctattactgggctgtgggctgctcacaagtcatacaccatcacccctacaccagcacatcgcaatgatcccacttcatttattaccaaaatatcacagaattccagtcatagttaacatacagcgtttaacacgaacctgatacctgtagaaagaactgagtatcgggacaattgagtcgttggaactgtaagccacgccccaaaccgcatcactccgtacttcaaaaatacgattttttgagagctttggaaactgaattaaaatgtctacacagctatgaacaattgtttaataaaactttttcatgtttccattacatgtaaatatatcaatttggcatctctataaaaactctgaaaatggtgcaaaagtttcattctctttgagaaagccattgacaaaaaatattcacacttcactaaaattttgaaaaatggtcttctttcaaagcttctttattaatctgaagtcttctgggttatcaaaatctaggtttgctttttcctcctaaaacactaaagaacatttattcacaaggattaaaaaaaaaaaataaaaaggcaatgggctgatggaaaactgataagggcttttctttttttttttctgaaaataatttaaaaagcttaaaagttacataggcatcttcaaaagaacacaatgggattcattttattgttgacttttggacaccagtgtcagactttattgaaaacaaacccatgtaaaaacaaagttaaaatgaaaaatggcacctgaaaaataaattattttatataaaacaaatcaataacttaaaacacactaatatacaaaaggtctaaccatctactgtacaacatgggaatcggttaagagagcctcccctcccccaaagcaagtcactgtaaacggaacatcacatggtcatggtcaaagaggtggccccaaaccaacggaaaaggcttctcttctggtggaagaaaaatccagtcctgtcaaagtctccgttagcctaacttaggtactggcggtgacttacaagtgagaaaaaaaaaatttgtttttttaaatggccaagaaagaaacctgaacgatgtcactgaaaggttgtagaaaaataggatccagccattagaggtcaggggaaatcaaaaaggtttggaaatgtgaaccctgcctgggatccgagattcagattctactgccatcattacacgccaattgccaatgccacttaaaagaaagcacttgtgacttcagggctgtcttgcgaagtttggggacaggaacccctgacccccagagtcagctaaaccccaggggtctctgctaaggagctgcctcaggtcctagtaggtgaggtaggtctggggaagatgggaggggattgaggtggagggtggggtggagggacaggatagaggcctcctgtcagctgaattcttattctctttcatccaacacaggaaggctgcgaaaagcacatggaaataaaagggggctgaatcggatgtgaaatgtaacagctgagtgatgtcaatttcgatttttcaagtccgatgccggactgggtaagtcatgtcttttcaatgcctggtggacaaatggccttcatttggaagcaaaccgggtcaaggaattgccactaaccgtcttcgggtgcttctatttctctgatccagcagggacccctgggctgccggctccaaagggccggtcttggctcccaacagcagcacggttcagtccctggaggctgggtctccaggactaaggccaagcgcagactctcagaggttaaggcagctgcccttggccaggaaaaggctcaccttccaggagaaggtggcggaacccacccagcaccacctgcgggcgggcccccgaggaagcccatgaatttcaggatattcacgcaggatggtggccggggaggggactcagcacccgggagggaatcagtcacagagctgcgactagaggcacagccagcacagaaaactgcggcttggcaaattacactgaaaacgaaataatggcagagccaagggggaacaagggagaattcatcaggaagcaggttcacaaattcggagctgcctggggtctaactaccagaggaagttacacacgggtcaaaagggaattcaatcaaagcctctttggtatttcccaaaccagatttttgataaatgaacattatctactctgaacgctttttcatcgaaattcccaaataaaagcagagcactcatttttgctaaatagaaatacaactgatctatgtaaaattttttaagaaatggtttcttttgggttgagccttttttaagaaaagggatctcccctttgcaaacaggccttgataagatgtaatgaactttgaggacacagggccagcaactagaaccttgatggaacagagattgcttttcaggagtgacagttgttaagctaaatccttccacaagcttgcaagctaagactcccaaataaaggctttggaattttttagctagaaggctgttcaaacagcggagaccacatacaatgagaatgttcctgaactgagaaacttcagggaactttcaaaggctcatatacttcacagtttcttctcacctgtcccagcatcagaataattgataggattcagataaaagggggcgaggaaagaagctgaggtgctacaagcccgtcatcattttcacagttgaagcttaagacagagttctctgttgaatgctagctatgggcatgtgtgggagtgagactccagggggagtttcagaagcgggaatcccgccttccatcagaagggtgttggctcccaccttccatcagaagggtgttggctcccaccttccatcagaagggtgttggctcccaccttccatcagaagggtgttggctcccaccttccatcagaagggtgttggctcccaccttccatcagaagatgctggcccagggaaacctgaaaggcttctttttccaggaaagcattctggtcccaggatgcagactgctctcgggcaacagagcagggaccctcttttgtgtcgaatccgggcaatgggcctcggttttggcttttcctgaggatctgggattctgtgggagaaaggaggtcctctctggcaccaggccgacttttatgagacacagcctgggtacggatggcaacatcatcaatttgcaaggatcgcgcacacagcccctcagtaaaagatcagggaaaggggaggggatgggcatcctcaattgtccaggggcctctcgagacgctgacctgctctggggacggtggtgcctgcctattgctcaatttcacacttcaataaataaatacataaataggtataaataaacagataaatacagccatcatctcatgagagcaataactaaaaaacagcctacggtcacgttttagtctcacgtcaaggttaaaaactgctggtactaagttatcctgtttgtgattctctctgtaaactagttatttataaacgccagatcccagtcctgaggagttttgggtgatctggccctgcctatttcacaggctttctctttcacccttcctccgggctcctggtttaaaagccaccagcctgtaactgcacattcttgcgtcacagattcagaaatgcttttgcttgaggcaaggattggtttcttaagatcttacgactcctccctgaatgctgggccacctgcaccttccctagccaaaaagaaagaaaaggtaaaataaaaaacaaaacaaaattcgagcaaaacaaaatcaaatttaatggtcttaaatgcaaaagtaaaaacaaacaaaaaacacaaaaaagcaaaagaaaattaacagaacagaacaacccaaaatgtcaaggcagttatgaagagaactttgagggttaatctttaaaactacaaatcaaaggttttggttaatagataactggcaagaagtaagtacttttctgctgagtgttcatacaaaagcaaaattccaaaacaaaatccgactaaaatagaaaaaggtctaagcgctcacgagaagggatgcgagaaatacaatgctcaaatgtttctgtgttattaaaatacagagccattttacgcctccaagctatgttaaatgctctggaaaacgggagaaattatcgtgaacaacagtatccaatgtgtggggcgctgtgcatgcaatgtgtggacagaaactcgggatgtcagagtagcaacacatcttcaggcgtgcctggagcttagatctgactctggaatatactggagtttccctgaaactctttggtccattcccattggtgcctgggcttacgaaacacgtttgtgtccttctctggagggcccgcccagcatgcagcccgtggcccccggccccagtggtggcccacgctggacgggcccgccgccattcccaggaccactcggcagagcccgggactgagtgagcaggaggtggcaacgggacctgcctggaaaaggaacttcctgtcaaccaaagcatacatcgcttacaatgttgaagcggttgagaaaacgcacactcagcatctgtctaacatctttagattaaaaactaaaactaaaaggtgatttttttgctacccagtctgtggagacattgaatgaaacgcgtgttagacagtcttagaggttaaagcatgcttcaggttcaccaccatccagagggactggttagtcaatgcagttctacttagatttctgtttaatatatatcttaaaggaaataacttacgaaacttaagattggtctaacattgtgggatttcaaacatttgaacatgtcggttgcatcccagagtataaaaaccttctcacttctcattcagacaaagacaaacacttgtgaaaattggcgcaaaatgagttgtacactaacaagaaaagtttcaactccttcactcttaattatctattccgtacaaaaaaaagcatgagcgagttatttgtgggacttgttggttttgaaggaaacctgtaagattttgtcccccaggcggtagccgttcaggctggctatggccatcgcggcttcttcatagtttgtcatggtcacaaagccaaaccctttgcacttgttggtgttgaagtcgcggatcactttcacattggtgacggcaccaaacggcccaaacatctgccagaggatcccctcgtcggcatcctgccccaggttgtagatgaaaatgcaccagccggaggaggcgtttcctggcacgttgacgccagagagcccgctcatgtgatcgacgcccatgggggagaacctggcagacagagagcaagcgtcaggccacggtcagcgcaggcggcctggggatggggcaaggcctggacgcatgctgaccatggccgctgggccccatcccgctctgcgcagccacgaggtgctcacggttgagacacctgcatgggtcaaaaccctgggaggaattaaatacagtagtggaggggcgggaccctgttctgtagggagctgactctgaggggctggttggtgccctccactcctcccactgtgtatgtcggggtttctgtttaggggttcctgcggttccccacattttagatgatgggcgcttctcctggtcctccgttgaaggtagaaatgctctgcaggcctctgacagcctcagttctccctggaggaaactctcctcgtactgtggggtacgtgcaggggctgaactcctttttccaaattttgcaccttccccttatcatgacccgcccccaagcgttgacagcccagtggtctctggttagagcacgcctttgccagggccacttgtagggcacaagaattccttcccaagcaccaggcaaccaaccctctgtggctagagctcaacatcccctgagggtcaggggccaaaccactgaggactgagaactcaagggacagggaagggccctgggacaccagcaacggcaggctcaccaaacttgaccacacacgtggggctctttccacagtgatacttttatttacataaaaaataagcctttctgggccaggcatggtggctcaagcacggaatcccaggactttgagaggccaaggtgggaggatcacttgaggccaggagtttgagaccagcctgggcaacacagagagaccccatctctaggaaaaaaacaaaaacctcagaaaacaaaaactaaactaaactaaaataaaataaagccttctgaaaatgtacagatgctgtaataaggattaaggtatatgacaaaacagttcctaaagctatgtttccctctggaactttctcacattaaaaaagtaaaggtctgagggtcagtttgggaatatctgagtagcatacatttgtgaagccggcatctgtgaagctgcgtgatgcatgcagagaagcattacctgctccaaaataaaactgggcttcaggctatggccctatcagccaagcgcagccctgcaggccccagccggggtaaacgagtgccttcaagcgctgttaaacagattcaccctctcgacagacacgagaggacaccagctgccatggggcagctcactagcccaacggtgattttctttatttttgagagagggtctcactatgttgtccagtatggtctcaaactcttaggctcaagtgatcctcctgcctcctgagcagctggaccacaggtgtgtgccaccatgctggctaatttttacattttttgtaaaaccattttcaggatggaaagactaagaagaaagggtctatgttgtccaggctggtctcaaattcctgggctcaagtgatcctcctgctttggcctcccaaagcgttgggattacaggcgtgagtcaatgcgcccggccttcttaggaattactcttgttggtagtttttctcctgctgatttctctggtcttgacagtcataaatcttctcctctcttcctccaacccaattcttttccatcccttatctctgggcttttctggacgtgatagggactgactgcaaactcactgcagtctgggtctttcttcctcctcttctctcagcctcctgagcgaatctttccctccagactctcccgccctccccacttccttccatcactttgtcttagtggttgccctgccactcacttttcctgctcgaccagaaatgtccacttctccggtttcccctttcttttcttgtcctcattactgggaccagagtcccatgtctcctccaaccttccctgttttccttccaggctaaggagcagttcacccaaccccaccgcccatatagcccgccccatcaagagcaggaccgactgtatgatgggatttctagagctggattttaaaattcagctccattccgtccagagaagcttccccagccttgtcttcaagccagaaacctcaaggaaggcaggccagctttggaatttgagccaggctgagaatgctgggtaactcagccatgagaataacacctctcacagcagcatgtgtggcactgggcagcgcccacccagcttcactgttaaaacaacgatggggccgggctcacgcctataatcccagtacgttgggaggctgaggtaggaggatcacttgaggctaggagtttaagaccagcctgggcaacacagtgagaccccatctcaacaaaaaataaaaacattaaaaattaaaaaaaaaagggaaatctatccttgtcatacctgagataagccctcgatgccactccttgaggttttgacaaaaacaaaacagccctgacactgagacctctgctgtttctgaggcgacagcacaccacatcctggagtccaaggccctgactctcatcgcctctatcccacttcatcctggcagccagaaccattttcaggatggaaagactaaggaatccgggaaaactcctcccctctaggacagggcttataaacagaatgcatacatacaacattcaccaatacaaatgactccacgaggcaggtgtttgaaaaaggtttgccttagggctgctgatcaaatgtctaagaatgctggaagatctactctcacccgagtatacctaaggcagcatcttttctcccacagatatgagacgttcattattcatttattttttagagaaagggtctcactctatcacccaggctgcagtgcagtggtgcaatcatagttcactgcagcctccacctcctgggttcaagcgatcctcccaccatggcctcctgagtagctgggactaaaggccagcatcaccatgcccagtttttttcattactttttgtaggaacaggggtctcactttgttgcccaggctgctcaaactcggggcttcaagtaatcctcctaactcggcctcctgagagctgagattacaggtgtgtgctcccccacactgggcatgaaaccatctttaaagctcgcggctccgttctgctgttactaggaactgcgtgctgaagctctaagtgctcacgctcacagcaactggtggggactggtgctgtcttttttttttttttaataaaaacaaaaaaagacaggttctggccctgtggcccaggctggagtgcagtggtatgatcacaactcactgcagcctcaacctcctgggctcaagcaatcctcccacctcagcttcctgagttgctgcaactacaggagcgcaccgccatgcctggccagctttgtattttttgtagagatggggtctcgcaatattgcccaggttggtcttgaactcctgggctcaatcgatcttcctctctcagccacccaaggtgctaggattacagggataagtcactgtgtccagcctggagtcactgttttgattcccatgaaagacaacgcccaatcggaagtaaacggctttcctacagacacctttctgatggaggttgtggtgtggagctgcagaatgattctgaaacgcgctctctgacgggatcagtctatcatccccgtggtttctattctgtggctgtgccgtcgcctgccagcggggctaagtatggctttcaggagcgcgcaccctcccgacccacctgaatctctgcgcctggtggtgaacggggcctccgaaccgtcgcgctggcgagtggtacagctgcgagaggagtgccacgtttttgttctggttggggttggctgcaaacttcactgtgatgggctcagaggaacctgggggtttatgaccattgaaactggtaattgcctcttctgcctccgaccgtttgtcaaaccggataaacgcaacccctctggacaaaccttttcaacaaatcaacaaaaacggagttagggggaaaaacgctaggactttcaaaactgaaaagcaaaagtcaggtcagtctactgtgggccaggctagaagtctggttaaggaaataaacaaaaattaaacctaaaagtgaaaacaaatggatggagtaaagaaaaccaatgactaacagaagattaaagcttcagactttcttcccggctgaagccatgactccacagtgttggcgcccaaagatattttggtgacagacatccccaatagacacccaggcctcttatttggaagaaagcaacattaggaaacagcacatccaccgtcactatttagctgccaggtgtccgccacagagtgggtgcgtgggtgtggtgtgtggttggtgggtaacagggttggagtggggactgcgtctgagagatcctccctgggctcaggggccactctcctggctgctgtctctgggcccgctgtgacagcaggcctcgtggccgagcctgctgcaaaggtgcccagctcagcctgcatgccttctccttcatgccaggagggagtagggtcctgtggccaccccctgccagctccatgctgctgctgtcacctcactcctgtcttgggatactccactctaaggtcctacacccctcccgtgggccccaaattgccatcagaatcaaatgaggccagaacactgcccaggctcatacagcagagctgaacctatccacaggctcgccaggcaggcctggggtccctgtatgggaagggccagggccccagcagccaagcccagagggcatcttctcttgccacctcaactgagccacccaagggccagtcccgggttcccggctaaacccaatccctggacggagcagtgtgagacctgaggaccgtcctgctatgggggacattggtcagctgggcatgggtgtgagatgctgagcaaggcgggtggaaggagagcatggctgtcctgcacccctgcctgtccatacactaggcccgggagggaaacatgagtagcccgtcccttgaggaacctgggaagcgggctggaaactggatgagggggatggggatgagggcacactgagcagcgcactagctccttctctgggggcaaggacatgatggagtcaggggaaggcccaggggtgggagaggtgacagctgagaggccagtctgagagtgacatcactaggcgggagtcacgggtgtgtcccagtgggagaggccgtcacagacagcccaacccaaacaccctggttctcaagacttttagtcaagccaggccaaggctcatgcctgtggtctcaactactccagaggctgaggcaagagaatcgcctgaggccaggagttcaagaccagcctggacaacacagtaagatctcacctcttaaggaaaaagaaagacttccagtcaaagggtgtcttaagtcaggtttcttctccaggcaaaggcctctggtgcatggtaacaaacaacgaccaaagccaggcagcccggggccttgggtgacctgtccagcgggcacccaactgtccccatgtcctgtctccacgcctcacacggcaccttactccaccacttcccagagggtcccgccagctgcccccacaatcgcgacactgcaggccccccgtgagcacagagacagcagctttagtaaggtcagacctagcgctacgcacacgtgccaggaatattctggggctcaagctcatttctgagctgctgctcagaaggaacacctgaaaacacaaccctgacagatgctgttttctttgagtctctcacgacacgaatgacagcttagtcagtcttggaaacctaaatgaaaatcgaactttaggcaaatacgactgagagctgacgctggccggctcgtagggaagctggctccaagcagatggcttcattctgtttctaaagaccctgcggcccagcggagagaaggcacgtgtgcaagtgtggcttcctcgtctggggttgtagagtggctttcaaatgcaaactgcctgagtgaaaggaagaaagctctagtaaggggggcaggagggatgctgtttagcagagggggatatcaattcactcaattatttaatggatgtatactttctgaagatggctctgcattttttgtttttttcttcccctagtgttttttatttttaattttttttttaagatggagtctcgctctgtcgcccaggctggagtacaatggcacgatctcagctcactgcaacctccacctccccggttcaagtgattctcctgcttcagcctcccgagtaggtgggactccaggcgcctgccaccatgcctggctaatttttattttattttactttatttatttatttagagatggagtttcgctctttttgcccaggctggagtgcaatggtgcaatctcggctcactgcaacctccgcctcccaggttcaaacgatactcctgcctcagcctccccagtagctgggattacaggtgcctgccaccatgcctggctaagtttttgtatttttagtggagacggggtttcaccatgttggccaggatggtctcgacctctcgacctcgtgatccgcccaccttggcctcccaaagtgctgggattacaggcataagccaccgtgcccggcctatttttagtacagatggggtttgccatgttggccaggcaggtctcgaactgctgacctcaggtgatccacccaccttggcctcccaaaatgctgggattacaggcgtgagccacggcccccggcccccttgtgttttttagaatttaacagcagagtccaagaaacggcataatctccagatgaatacactataaagttcacaattaaggtggatatagaagcgaaggaatacaaaaaattaagctctgtcagctcagggtgggattttttttctctttttttaaaaaaagagttgggggtctcgctatgttggccaggctgttctgaactcctgggctcaagcaatcctcccaccttggcctcccaaagtattaggattacaggcgtgagccaccgcgcccggccatcctcatctatttaacactaaaaagcccgtcacaggaaggcaaactccacacaggctggcctgccacacacactctgtctccagcagagggagctacagccctgggatgggagcctcaccttcccaccaattctgcatcctggggtgggaagcagagccgggagaccctcctggctcccttctctctgcctccctcactgctctgcaaagatgacaaaggttccttaggccaccttgaggttcacagccgaccctgggggcgcaatactaaggtgcccccaacaccctgggagacactatcttgcagagggaaaggaagcaatgcccccagcagctgtgtgcagaggtgagttccccctgcctgtggcccgtgtgtgcctgagagactagggaaggccccaagagagttgggtggctggaggcatgttctcaggcattgggggctccaagtggagcacaggcttccctcatcagggccatactggacacagacaggccgaggcagagcagtgcatgtggggtctagaggaggaggggagtggactgtgggccagtgaggttggttcccccggccctgggccctgcacagccagctcagatgccccagtgcagaatggggggcaataaacccacacactggcccactgacaggatcattcgctcagctggcacttaagtgagaggacttcagggaccacaggagactcttctggtgcagaccaggggagtttacaccgagtaactggcatcccccgaccctctccccagagcaaaggcagaatggcggcggccgtgcgagtgagccctgtccttcggcactgcccggtgccagggcgcgagtctgtgctaggctacaggaagctcccagggcccccatgaagtgcaaaggggcccttcccctcctcgggccccagcgggaacgaaggccggcagcggcagggccagtgcatgccaggtggggttcctacagccggaaaggaggaggaagagagactgataaggccgcccaccccaaagcacgcagctcaggggacgcaggacaatgtgcatgcccctctagcctgcaggccaggaaggccccacctgtgtgcacatgaaaggcgaggctctgggctgctgggggagtgctgctgttctctcaaaaagaggtcacctcagagcatgactttctgtggcccaactactcggtgttatttcaacatcacagccaaggtgcggcacacacagtctgtgtgggaagaatatgaaaaccacccatacaacgcatgggcctcactaggctcagggagtggattcttccctgctggttagttagcagactcctgctcctgccccaaacagagctgagcgatcctaaatcccctcagggtggcccgagctccctgtcccccaggcggggccacgtgcagggcttggcaaaggatgtggtggggcactagttcctagcctagtgcggcaggcgggccaggcagtagggccggagcacagccgtgggcgtgcacatgtcccctgctcatctctgcctgacggcatcacacaaagcccagagcccacatccagtgccaagacggactgggagggccagcaaagtggccaggattgcctgcccattagaggaattcgctgccatgtgctctgtgcactttagatgtgctccccagagaggggcatccgaattctggggatttgggccatcagactactgcaccccaaatgcctgcaacgaaagccacagtggacaaatgtgcagcagcctttttttttctttttctttttttttaagaaacagggtcttgctctgttgcccaggctgaagtgtagtggcgcgatcacggctcaccacagctgtgaactcctgggctcaagcaatcctcccacctcagtctcctgagcagctgtgatgacatgcccgcgccaccgcacctggctgcagtatcctttttttttttttttttttttttttttttgagatgaaatcccgctctgctgcccaggctggagttcagtggcgcaatctcggcttgctgcaatctccgcctcctggggtccaggcgattctcctgcctcagcctcccgagtagctgggattacaggcgcctgccaccacacctggctaatttttgtatttttagtagagatggggcttcaccatgttggccaggctggtctcaaactcctgacctcaggtgatccgtccacctcggcctcccaaagtgctgggattacaggcgtgagccaccacacccggcctgcagtgtccttttcaccccattcatgggcaaggccagcacatttgggtgcctgagggaaggtgctagaatctcttggcgttttcactgtacatgaaatgctggcctaatccccagctttttttttttttttttttaagacggagtctcgctctgtcacccacgctggagtgcagtggcaagacctcggctcactgcaacctccgcttcccgggttcatgccattctcctgtctcagcctcccgagtagctgggactacaggcgcccgccaccatgcccagctaattttttgtatttttagtagagacagggtttcaccatgttggtcaggctggtctccatctcctgacctcgtgatccacccaccttggcctcccaaagtgctgggattacaggcgtgagccaccacgcccagatatccccagcttcttttaatgccatcttacctcctcagcctcctcaaaccaaagccaacgtcttctcattttggtgctgtcctcgtttgcggaataactaatgacatttaaaatcaaacggtgatctgccttccctagaaaacccagcccccacctagagaacaccctccccacgcgtctggggcccctctggtacctgtagtctgatccacgaggacccgcgagttgatgatccgcccaaaccgagagaacatgtcttctacgtccttctgggtcatggtccgcgggagcccgctgatgtacaagttggcgtctttgatcacctctgagctcgggcgagcatacgacaccttgggaacacaaccactttccgagattagtacaggcacgtggccaaagcattgaggagggtgttgaatgctgggttaggaaaagccaacactgtgtgttagaaatcatgcagggaacgattatcatcactgacgctcaccgcctgcagccgcatggtggcaagctcactgagggatgggccgtgagccaggatgcctggcagtgcttcctcactgggtgctcaccatcctcaaggaggcaggcgtgactcctatgtcacaaagcccagcaactgagggcccgcagcttgtgtgtggctacctctctgatgtgctggacagtgagccggtgccagagaggtcctggtgcctgaaagcagcccgtgctgcagcgggcaagcaagctgggagctactgggaacacaggagactcccctgccaaagagcaagctcgccacagaagccctgacaggggctgtgagttctgggaggaccccgagtttgtactcaaatccactcaagtgttcaatattaaacgactcaatgccttttggatttatattttgcaaaatcaaagaaaactgaagagaaccttctgggtgctttgacaaaatggtacattcatcattcgtgtggagagggtggtgaggggagcccggaggccaatgcaagacaaggtcttcggtgctttctcaggttggcgctgacggccgtgcagaccccatgggcccagaaggaagaaaaggaccacagtggaacccctctgcctgtgaaggggcagcctggcaggactcacagcctcgtcaggaggctgggatatggaggagggagcaggagatgtgttcccgagaagggtggggacttgaacctgtgcgaaaggaagttcattccctttgagtgaggggcacagaactgatgagccaaggtaactgagaccagaacgcagggagaagccgccactcaggagtcactgggcagaatctgcgtgctgagaacacacacacagcatcctctgagaagctcctatcatgttccagagaaggaacaacagacattgcccctgctcatagggcagtgggcggcccagcaggggaacaggacagccccacgaggagaggagtgtggggctggaggccagctctgcctggtagcggtgggaatcgagggagcatgtcactacggagcccatgaggtctctggggaagccgtgctgctcccaggcccggggcacctccatcagcctgtggacaggagctctggggacacttgctcaccccatgatgtgggtcaggggctgccagtgctgtccccagagaaaaagaggctgccttggcccccagcctcccctagtgtccgggcttgccctggctccctgcagacctgtctggactggggcagtatttgggggcctgccaaaccatgaccctggcgccagtggagcggagctgaggctggcactgactggacctactgccgtccctggatgaagccccagaggagaagtgccctagagccaaatgctggggaaagctctgatgcctcccaaggacaggtgtctccaaggaccatgggaactctgctttcctcttctctctggacactgtcatgttcagtcaggctagaatcagaacagctggcgcacagcaggcgtgcactgacctggggctccccggcccctcggccagaaccctctttcctaagctcccaacatcgcttgctctttggcctcaatcaggtctttttctggctgcccattctcaagaattcatccagtgaggggttcaatcgtgttccccccaccccacaatccaaattcatatgccgaagtcctaaccccttgggacctcaaaacgtgacctgatttggatacagtcattgcggatgtaatcagttaagacgaggtcacactggtatagggtgatctctaatcaaatgtgactgatgtccttataaaagagggaaatttaggccaggtgtggtggcgcaggccagtaatcccactgttttggaggctgagtgggaggatcgcttgaacccaagagttcagcctgggcaacatggcaagaccccatctctacaaaaaaaattagctggtcgtggtggggcatacctctattcccagctactcgggaggctgaggtaggaggatcacctgagctcaggagtttgaggctgcagtgagccgtgatcacatcactgcagtccagcctgggtgactgagtgaggtcctgtctttaaaaaaaaaaaaaaagtatttttttttggctgggcgcagtggctcatgcctataatcccagcactttgggaggccgaggcgggtggatcacgaggtcaggagatcgagaccatcctggctaacatggtgaaaccccatctctactaaaaatacaaaaaattagccaggcatggtggcaggcgcctgtagtcccagctactcgggaggctgaggcaggagaatggcgtgaacccaggaggcggagcttgcagtgagccgagatcgcgccactgcactccagcctgagtgacagagcaagactccatctcaaaaaaaaaaaaagtattttttttgaaaacataaattcaatttagaaaggcgggaaatgtggatacaggcactctcacagggagaagtctgtgtgaagatggaggcagacactggggtgatgcttctctaaagcaagcagtgccagagaccaccagcctccaccagaagctgtgagagaggcctgtgacagatcccttcccagtgccttcaagagaaaccaaccctgctgacaccttggtctcgggcttccagcctccagaactgtgagttgatacccttcttctgttgaagcaacctggcctgtggggctttgtcatggcagctgagcaaactcctgaccactcagcttgccacagatccctccactggcatcaacgcccagttcctcctgtccctatttagttcttgactgcgttgatcatgacctgacacgctacattttttttttttttttttagttttttttgtagagacagggtcttgctatgttgctcaggttagacttgaactcctgggctcaagtgatcctcctgccccagcctcccaaatgccctggattacaggcatgcaccaccctgcctggcatctattttacttatttaacttttaactttgcaaacagactctgtgagggccagacttgtgtgtctcctgccatatccaaagcactcagagcagcctcaggtgaacggcaggcatctggggaccgctgctgcgtgagtggagtgcgcagtagccactgctgtgaagaacgcctgcctatctgcactgcagtccccggcgccggcttctgtgggtgacaggagttctgctgttctggttcctgaggcttggatctcacaatgtgctggggaagcctccaggtgacaatgttaagtgcctgtagccacatacagcacccggtttcacaccctggctttgcccctccatccctccgtgaccttggcagagctgtttcactactcgaaacatcagcttcttcaacccgaatctggggaccattttttatggggctgtggagagggcacgtgagatacaggatggaaggtctggccccgtcagcctttgataagcactggctgtgtgtggcacacagggacccagcagtgatgaagagctgcacacagagactgtgcagcatcccagcagggacactgagctgcatctgggacatgctcagcctgtcgcctccatgcaggaccactcccactgtggctgcctgggctgctactatgggaaaaagatagatagggatgaggagacaggactcctccttctccactctgccaccaagggaatgacatcaggaccaaagaggacagagcggacggggtgaaggcaaggcacgtctgcgctctctgtgcagggctggggcctcagagcccaggatgagcacaaggctccaggaggccctgcctgcaagggaggagcggggcagaggcttggggccagcctgcagttcccatgatgtgcctggccactgggtctcctctaggatgcggcccttgccttgtgcccctgcaggtcctgctgctcagaataccctcatctccaccctggtctggctaactccctctcctcctccagatctcaactctggctttcttgagggagcctcctctggcactggccactattataggctcctaagcccaccctgggaccaccttacagagaatggtgggcacaactgggctccccgaggatggaccatgggccagtgacccccagcacctggcagagggcttggccctagcccgtattgtcataaaggatttgtctggtctctgtcccagattcctaggaggaagcttgtaaaactcctggaatttctgtctttgttaccataaggccttggatcccacttgagtttgtgctaagtgatggctcaggatgggctccgacaccagaaagaccaagcatgtgactagacggctggggctgtgagctgggcgataccggcctgacctccagggtgggggaggggaaaggggtgctggggatggagttcgatcacatggccaaagagtcaatcggtcatgcattcgtaatgagcccagtaaacacggcagacaccaaagctccacggagcctcctggcaggtgcacaggtcacatgcagggaggactaggcacctgatcccaccaggtgcagacatgtgagctctgtgcttgggaccctccctgtgtggctcttcatttggcaggccctgagttgcaacctttataaacaaactgtcatcagaagtgtgagttccaggagtcattctagtgagtcatgcaccctgaaggggtggcgggaaccctgaatttgtagccagctggtcaaaagtgcaggggcctggggtcccccaaagggtgactggcatctgaggtgagggcggtcttgttggggaccgtggccttaaatgtgctggggctgtgctaactctgggtgactggtgtcagaatagaactgcaggacaccaggtggcatcagaccaagatgcaataaaatccaggatcagttgaacgcacaactccatccaggcccttatcacactgcacagatcagtcacctttaaactggggatggcaggggatccgaagtccctcagtatcaacgtatctggcccagcaccacactggccaggggctcagtaaaggtttgcggaatgaacacacttggagcacagaggaccccagggctgcgccgggggaactgctagaggagccaggcccagggagcctcggggagacctggggagaaattacttagggctgtcacgtccccatgaggctggcctgtttctgcagaactaggacagtggtgtgaagccactgagaagcagactctgccggcagagggcagggccgccgaaggtgaggcaggcttctgcatgcatggccgggatgacagggagggacacctgcccaggcctgggcccctggggtcccgtgaggctctggctccaaactcaggcagccactccagcctttcccaccaacatcaatcctagagaggcaagacagtcctgtttacacactgggcacccggctcctgcatctgagtaaacggaacagctgtgcaggaataatcaagcgttctgctccacacctcagcctggctgcctcagaaacaagaaccttcacacattttctaaataggggagagaattcctagatggggagtccagggccaaggataagccacctggggctggaggcgaggaagggctgcccctgctcaggtggaatcccatggcgcttggctgccctcaccagcccccaccggggaaggtgcctctgaggacctgcactggacacgaggaggcaggagtggcgcgcctgccctcagggagcccactgcacaccacgtccatgcggcatggggcaggtctgggagagctgctgctgagccagggtttggccactgagtaaccaagatcatggggcagtctgaaggcagggacagaggccagctgttggctgaaggtgctgtcactgtcaggtcacagaacccctcttggtgggcaggcaaaaatccaggctcccaggcccaccctgcagtgactcaggaggcccccctgtgaccatggaatctatatgttacagctccccaggaggccctaataattggcaggtccaagagggacccttcagggtgcctgatgtgactcagggagcacctttctctggggcaggggaatctagcagatctaaaggctcacacaggaccacctcattccaaatggccttggagcaagagaggggattctggccgggaagcccttacgtctgtgggtatcttgtgaaggcgggcactgagggcgggtgggtgcagtggctgctgcaggaagcccagttgcaggggcctgcctggggcacgggaggctcagggaaggctcagcagtacccaggactgacaggagaccagggagcaaaggtcggaaagacacgaggcttgatacaggtggcaggagctgcccacgaacccaggagccagaaggcagacacgtggggacgggggtaagtggggctcggggttgacagccccagtgcacgagagcgcgggtcagatgatgaggacagaggaaatccatctgtgtgacctggaggacctgcaactcatcccaggaagccactatggccctgctggaggtgctgcccctgggctgctgcacagttggcttcctcaagtcacctgccgctgtgaagcctccacacacggcaactgccggtcacacatggctatcctctgtcttgtttactgtctgcacccccgacccacgggggcactgaatttgtctgttttggtcactgtggggcacacagtaggtgctgagtgaggtgctgggtgagggaagggttacaactggccccaaggagcgcagagggagcactgggcaggctgggggtggatggagctgtccagggatgggaacacagagagccaggcaggagagacgacaggggaggcctgggagctgacgcaacctgggggcaccctgggcggggagtgggtcctgagacactcatgtaaggcctgggtcagatacacctgaccagggtatctgatgggagcccccgaggagcggctgtgctcatagtcccttggagagtgactgtgaggctgggcggggctcagcacagacctgtgcccagggcaggaatggatgcggtggtgatcagatccctttaccttaatggtttttgactggagcctcaagccgttcagcgtgttgatcgctctctctgcatccttcgcggtcacgtagttcacaaagccatagcccaagctgtgtcctgtgcaagagaacatgaagacattggtaagccaaccgtctgcgagtgagggacagggaggtcgggaagcactatatctgcctggcctttgggaaatgggattacaggtgctagcaaactttattttctttggcaaacacgtacattttctgcaatgaacacaggttcctttttttttttttttttaaagagataggatcttgctctgtcacccagggtggagtccagcgctgtgatcacagctcaccgccacctcaaattcttgggctcaagacagcctcccacctcagcctccagagtatctgggactacaggcccgctccagcaggcccaagctaattgttaaaattatttttagagatggggtctcactatgtcacccaggctggtctaaaacttctgggctcaagcaatcctcccacctcggccccacctcgacctcccaaagtgttgggattacagatgtgagccactgagcctggccaagaggttttacttttgtaattaaaataaccccaaaagttatttacaaaggagtattttttaaaaatactgtgctacggacagcatctttctgaaagaccagtcccgtgggtgccggccgctctgtggggcctgggtggtgaggatgaggaaggccacggcagtggacaggctggtgggaccccagtttgtgtcactgctgtttctctgccacttccttgtccagagcaggagggcctgctggcaccacccaccaccagttccatttacctttccaagcctgagaccagcccgaccccgctgtggggcagaagagtccagggagaggccaggggctgagaatccccagccctgccagacagtgggggagaaccaggttcacaggcagatgtccctgtaccccctttgtgaaacactcagcacaggtacaagtgaacacccactcactggataccatgggagggactcgggagggcaagggcaggaccagaggggacagcctctggggtcagggttcagaaggagcttcacaggacatttggccaaatgctctcactaaaggggaagtgaggaggcacagggaagagcgcaatccccgtctcccgcagcttatccatgcacttgcaaggctgctgaacatctgctgtgggcctgagcctcacccagcactgctccattcccccagccggcagagcgcgacaacgagcaggtcaccgaacaggaggtggcctggagccccactgaggcagagatcctcctggcagctgggccagggacatccagatccatctcaccgacagcaagattacaaatccagcagagagcctaacccaggtttgccactttctttttaaaatgaattttatttttcagaacagttttaggtttacagaaaaattacaaggataataccaagttcccatatggccccctcccagtttcccctatgggtaccaccgcaagtgagtatgaaatgctggtgacgatgaatgttcccattacctctagtccacgccccagccgcttccttagtctttccctcatgttctttcctgccccaggacctcatccaggatcccacgtgacatttagcagtcacatcccctcaggctcctctcgactatgacagtttcttgtttctcgtgactgtgacggttttgaggactggtcggacatcccgtagactctcgattgggtttgctggagtctgtcacagctggagcgcccttctcgtcacacgatgtcaagggcacaggccgtcaacgtgacttatggctgctggtgctgaccgtgatcactgggccgaggcagtcagtttgccaggtttcttggctgtaaagtgactcccacccctttccacactgccctccgcggaaggaagtcaggacgcccagcccacacttaaggcatggccctgacgtagcagctatagaaatgacgtgcagttagttctgcatggggcgctctctttcctaaagaacaaaaccaaaatcagatcctctagactcgtatttctaataaaactcctcagggctaagagactcagctctggggccctggacaaagtgagaacccagagcaccaagaccgtaggaccaggcccgtgtggagcgaattgggatcgcagcttggagaacaagcaacggagcagtgcagccaggtcaggactgccagggcctctgcaagtgctccagatggcagtgtgaaactggcaggtgtccctgcaccccctttgtgacacactcagcacacgtacaagcgaatacccactcactggacaccacgggagggactcgggatggcaagggcaggaccagaggggacagcctctggggtcagggattcctgtgatatggattcttgaccacgacgccagcctggctgggtttttttcactcctgaacacctgctctcgaagtgctcagcgccttctgcatccgggccccatctttctgctccataaacaagcctggaccacctgcctccttggctgcggcgcctcaggcagcctaagtgctgcttgagaaagtcacacactgatagggactcgagcaccaatgcccgttcctgtgtcctcagccacagccggttcctctcaacacagaaacatggtccctgcttggaccaagtccctgcttcctcatctcccaggtgctgggtgatcctgactggtcccctaggatggtcactgccctggggaccgtttcaggatgtgtcccctgagctttcggcagctcagggtagggcctaccctcttgggacacccctcctccaggatgtggaaaccacaccaggtttccgtctccctggctgtccctcctcaggctcctcactccctgtccattccatggagacccatgggccctgaggacccacctttggcccttgtctctgccacatgctcttcctcaccacacatgcccacacctgccaacatcaccgagggagtcgcacacccctgggctgcccgtcaccttccatggtcaagctcttctctgtcctcaaggagctgacgcattaactgagcacctactatgtgtcaggccctgtgcttggctgggagttagtgatgcatgacagaggacggtcgctgccatcatgaaagccatcacatccctgggggcaagtcagacaacatggtggtgagaaactgacaagcattaagacaggggtcaggagggcccgtcgcagaggagatattttaaacctctgcgtggctgacgtgagcattccagacagaagagcaggtgccaagtctccgaggcagagacaatgccagtgtattcccagaaagtagaggtggcccgtgtggcaagggcctaggaagtggccactggcagcagggcagagccagtgtggagccagcgggctggtgatctaatccagatgggagatgcaggctatgtgcacaggccagggcagtagaggaatgccccacccagaggacaggtagtgggggcaggcccctgatctccctacaggctgagccttgtgagtcaaggcctggcttcatccccagaatctgctctcctctctgtggtaggtgcctggaggcagcaggaaggcaggcaggtgagggatgaaggtgccctggtttccacccgctgggtgaggccatcactggaagggctttgtccagcacctgaccacccacctccacctttgcctccaatagaaacaaatctggacagctttctaagccaccactgactgcccaggcgacacccccaaccaatgaagtcagaaaaggaggaggtgggggggttgccagttggcctcagtggttttaagtcagggtctcagtctgttgccaagactcggctcactgcaacctctgcctcctaggctcaggcgatgctcccacctcagccccccaagtagctgggactagaggggcacgccaccatgcccagctaattttttaattttttgtagagatggggtttcgccatgttgcccaggttggtctcaaactcctgagctcaagcgatcctcccaccttggcctcccaaagtgctgggattataggcgtgcgccaccgcgcccagcctcctcagtggtttttaaagctccctagtgattccagtgcatgaggggcatggggcttcccatggttatgcagaggagaggaggcctccagaggagaagtgcaaacgggcccccaagttactgtttctccaggcagggtccacaagccacctgcaccaggggcatctggagttcaaggcaacaacttggctccctagatacccctaccccatcccgggacccaggatgtcaggcaggtgtgggaatccacatccccaaactccttacagatgctcctcctgcccaccagtggcagagcttgccaaagcccctgcctggagatgggagatcagccctgagacaggaggcctgagggtttgcgagggagcaggaggacagggagccaagctcagaggggcctggctcctgcacaggccgtggtgggcctgcctggtgtcagtgctcggggggcaaacggggcccctgggatgggagatgggatggagagggtgtgggtgggagatacggggaagcaggaaggagactggcagggaggaatgcaggatgcagaacccgggagtgaaatgcagggctgtcccagaggccagtgcatgcccggctctcacttccctcaactggaggaagagcctcctcaccctttctggccacaaggcagggtctgagagtcacatttccccaagtatcctgatgctgctgctggcccagggactgtaccctgaaagctgctgcctggagaagacaaagctgcctctgcggggagcaccatggttgccttactgggcacccatacaccgcccacactgggcaaacactggccagtgctctcgaacttccaaacacatttctccctctctttggatgagggttaagactggagagctgcttccttgtcttatgctgccagacacaatgcttccatccctccatgcttcttgcagctggaagcgccctgacctgacacggggtgcagggctgagggggcgagtgccctgtgggtgaagccctcctctgcaccgtgagggcaggtcccgtgagttctctctttaaaggctcaagggaagacctcactgagagacagagactggaggtggagactgaattaattcagcaataaataagaaacagcaaaggtctgcaaaagaaaagaaacaggcgaaggacaagaagggtattttacaaaagtagtacaaacaaccactaaatagaaacagtgatgaacttcactcgaaataggaatcaccctgatcggatgtcgctcgtccctcacagggtggcaaaggtgagaaatcctgccaaggctagcggatagcagggctggacagaaggaagggtgaactaagcgtcccctagagagcgagttagcgacagggaccaagagcctttaaaaggtgcgctctcccatctgccgcttcaccggcaggaagactttctatggaaataaccagtgagcaaagatttgtgccaggacatttatgtcagcagggctttcaaatatcaacaaatgggaagcagaatactatgcgaccgatgatgatgggatcgcgagatgttcagcgaagtggaaaaatgtccagatacaggaagggaagtttatccacagcctgagagaagagcccattctgtagaagtacgtggctgcttatggccatgaatacgtaaagaaaatcatttggagggacatgtgcccaaaagctaacagcggtatgattgtgggtgattttttgtttgtttgtttctgcttggctcatgcttaagtttttttttctgtgaggagcaaacatgactcatattaagaaaaaagccatcaggctgggaaagtccggaaggacattcctgcagagggaacagtgttcagagaatcacaagcgcccaagagtagagcctgaccggggggtgccgggggggggggagggtgcagcaagtggggagagggggcaggcgcccaggggtgtccctaccctcttgggacaccccctcctccgggatgtggttaaagccttgggcagcggtgtgggctttaacccgaccagagatatacagcaagacagaagccgtgaatggggctgcagcctggtggctccggcatgacaggtcatccatgagggtagagggctgactccttctgatcccccgagggacatatggggccactgtggagagaccagacactggggcagggctgcccaggaaggcagcgggcaggaccaccgggcgctgcagtggcctccttagctggtgtttgtgggtggaacagccaacaaccaaccaacgccatatccccaacatagggaccagggccaggccagccagaaacattccgagtcttgagagcagcacatggggcagtcccttcctcccagccatcatcacgcccctccttcctcccgccaccagtgcccagcccatggctggcactcaaccagtatttgctgaatgatgatctgcactctcccccatccccagcaccactcattcattcattccttccttcactctgcaaacaccgactggctatgtctagggctacggagattaacaaagctcctccctccaggagagatactcatgtgctggaccagaaagctccagctcagtgccaggtggaaaccccacagtgcaggtcggcccaggtgccataggaacccacagcggagcatctgacacttgggccaagggaggcctccttaagcaaacacgaccaggacctgaacggtttgaggaggggagtgacagggtcacatgcgggctgtcaaacaggcccctctgctgcagtgaggacagtggtcttcagggagcataggaggccagttaagaggccaaaacgacagtgcaggccaccagcagtggtgtcctgggctagaatggtggctgaggagagaggggaaagggatggactgaagcaacacccaggaggatgagagccaaggacacgcctagatttctgagcagagctaccaagtggatggtggtgccatcggctaaggtggggacaactggaaacgagtggctggctttagggagagtcaggtcagttaggaatatactgaatttaaggggccgagggcttctggagctcaggacagccttctggtcaaaaaggaggtggcagacagagggcagctgggagccatgaggtgactctgcccaccgtgagtgtcagctttggaagaagaggagaatgacataaccctctgagcataaccctctggcataaccggctgagtcaaaggctggggaaaggcgctaaagacagatggggcatggcctcaggggcagttagacaggtgggaggaggaggtgctcctgaaagccaatgggagaggatgcttctggaaggaggtggagacagggaacaggacagtatgtgggtgggaggccaacacacacagcagtggctctcgctaggggagactctgcctcccaggggacatgcggcaatgtcaggacatttttgggtttcaccactgggatgtcactactgggaccacgtgggtggaggccagggatgctgctcaacaccctgcagtgtccagtgcggcgtccagccctgacatcaggagccacagatgtggaggaactccgagctagaggaagctggaagtctggaaggaattcctttcaagacactcgaagcccaggaaaagtgggcacttggagagcctgaggctcttgggaagccgggaagggaagggaagggaggatcggggctggagagctggagacgctattagttccactgcgaagcgggaggtggtcatcagctgagggtgaagggggtggtcagaggaccgaggagggtaaacacggggaaatggctgctgtggggctcggagacacccgtgttgtgagctgagctaggccagggatcagattcgccggggtgcctgcctggccgggtgagaggctgtcttgggaggctgggagaaagccgttggctggggagaggggtggtgagacctagcgccgtgccccgggccctgccagcgaagaggtttgcccacactggcggcaggctgagcaaagccaggttgcagcatgttctccgtaaagctccagtcacttgaagggctgctaacaagaggctgggccaagatgaaagcccaggcccagccactccacaactcctggtgcgccagttactaactactgtccaaagataagacagggctcacctccgaactgaaataatttccaaattacacttttgcagccttcactgattctcaaaaccagttctctccagactgagccaaatctaggtgttcctttagcatagctcacattcctgtgaaaaccacaagggaacagacaaagaagtcaggttgcaggagaataactgcaaattccatgggaatgcttgcaatatctctggtgctcaggaatatcaaggaaaattcccttccaccagaaagaggaaaaaggtgagaattgttagtggcacaggagaattttaaaacccttctcttatttaggatggtctcctggagcaggagagagatgctggcttctagaacattctaacactgctcaagtttgtatactgtgtaaaatccccattgagaaggcgtttattaaatcagactcttggagttggaaggagagaaggctttcttattcagtgcctgcatctgaagagctaattccctgtagagcggccagacaggctctttgggagtcatgtgggggtcaggtgtcttaaggttactggggaaatgttgaagataaagtgcaatgatgggtacatcaggttcaacacatcactctatgttcatgtatgcctgaaatgtttcataatagaaacttttgttaactttttatttttgagacagagtctcactctgttgcccacactggagtgcagtggcacaatctcagctcattgcaacctccgcctcccaggttcaagtgattctcctgcctcggcctcttgagtagctgggattataggcgtgcgccaccacgcctggctaatttttgaattttagtatagacagggtttcaccatgttggccaggctggtctcgaactcctgacctcaggtgatctgcctgccttgacctcccaaagtgctgggattataggcatgagccaccgtgcccagcattcaacttttaaattagttttttttttttttgagacaaggtctcactatgttgcccaggctaaagtgtagaagacactttagtaccaagtggtacttggtaaggtgcaatctcagctcactgcaacctcaacccccgagactcaagcaattctcctgcctcagcgcccccaaatagccaggaccacagatgcgggccaccacgcccagctaagtttttgtatttttcgtaaagatggggtttcaccatgttgcccaggctggtcttgaacttctgagcaagtgatcctcccacctcgacctcccaaagtgctgggattataggtgtgagccactgtgcccagcctgaagtgagttttcagtatagggaatcacagtccccaaatccagggtggcagacagagccccgagaggactggccgctccttggcttcctaaagcagggcggagacagaaaggaaggcaggggggtaggggtgggtagagggaagaggaggaagaggggccattgggagaggaggaggaggagagctccgcacatggtctgtccgtaattctctcccgagtccttgaagccatgctctcagaatggaggccactctgtaaggaaggccttcacaagtgccaggacctctgcaaacacctacgaggtagggaccaccaggatgtagaagccacaatctccacattccggatggggacacaaaggcttagaagtcccactgtgagggagtggaacagcagggcttttagctgccaggctcctgcccctctgagagttcaagctcagcatggtgcagaagttcaagttgatggtgttgacagtagacagagcagcccaaacataacgaagggctgtccacaaggtcctcggtgttctgctgacctgggcctgaccaagagtgggggcctggacagacaggggcaggcctacctgcacctgccctggacagtacactcgccagggtcccttccacacgtgggacccaatcaatctgcccaggccaagccaggtcaggctgtggttctccagccccttccagctctcagaatgccctgtctctggttccttcctctcctcccactgtcttattttgtacatgctctctgtcttacaatgaatttttcctcttttgggaacttatgtccgatcttatacaagagcaatggacagagtttgaaataaaaatgaaacttcacagccatcgtttcaaggctgtagttatcctgcactgaggaatgccacagagtcacaggcaaaggagacagtgcccaaaggatggccaccaatacccggtttactaaaacgcctccatttctttacctgctactttatcccgaataagttttgcagattcaacttcaccaatgctgctgaacaggcttcgtaactcatcctgggtcatgttctgagggaggtagttgacgatcaaattcgttctcccgatgtcacccctgcagtcttcggccatgtggtcttcataaccattagacattgtatttttcaaaaatctgccaagagaaaaagagcaagtaaattcaaaatgttcatattgcagtatatgaaggcaaaactagtaactgcatttgcacttagagattttctttctttctttttttttttttttgttttgtttttgagacagagtctcactctgtcacccaggctggagtgcagtggcacaatctcggcttactgcaacctctgcgtcccaggttcaagtgattctcctacctcagcctcctgagtagctgggattacaggcgtctgccaccatgcccagctaatttttgtatttttagtagagacggggtttcgtcgtgttggccaggctggtctcaaactcctgaactcaggtgatccacctgcctcggcctcccaaagtgctgggattagaggcatgagccacagcacctggccctgcacttagagattcttttctatgctgcatgttaacttacagccacacaaaaatctgcacatggatgtttacagcggcttcactcataattgccaaaacctggaagcaaccaggatctcctccaatgggtgaatgaatgaacagactccattcatgtggttcagctgcacaggggcatattttttgatgataaaaagaaatgagctattaagctaggaaagacatttaaaggaactttaaatgtatactgttaagtgatacactgtatgattccaactctatgaccttctggaagaggcacactacagagaaaaagatcaatggttgccagcgatgcaggtcggcgtgggggggacaacaaatagtggaacacgggattgtcagggttttagggcagtgaaactattttgcatgatatatagtggtggatgtgacaatacatgtttgtcaaaacccacagaatgaacaatatacagagtgaactctaatctgaattacgtgctttagttactaataatgtgtcaatattgattcaccaagaataacagaggtaccatgtgaatgtgagatgctaataatgggtgtggcggcgccatcacagctcacagcagccaaggctcctgggagatcctcaagcgatcctcacacctcagcctcctgagtagctgggaacgcaggcatgtgccaccacgcccggctgatttttaaaactttttgtagagatggtatcttgcccaggttaattttgaactcctggcctcaagtaatccttccatctcaccctcccaaagtgctaggattacgggcatgagccactgtgtccggcttctttctatttaaaaaaaattttattcagtcaatacttcattgtaatgctacagaacgagtgttctccacaatttttctgtaaacctaaaactgctctaaaaaatagtctatggacacaaaacagaacaactccaagttcactaagagggcttcggagagacctacaaacaattccagcaccacaatttaagatcctgtaaaaaagcctttgggttgtctctcgagagaattccagatttccgattgctttctccccatgtccagagcctgtggggtgtacctgaaccccacccctggacaccctgctgctgagggggcaggtaggcaatggtcctctgcacctgtttattcccaaagacacagtgagtgagctggaaagaggtgagggtttctctaccagtcagaggaacttggtcttcacagtttgcaggctttgaaatgtctttctcagttgctgaagtctttcctttcagtgataaacatcagagccagtgatgactttggagaagagtccagatcaatgcggccaagtatgccgagcccgccctgctgaaagtgcgccgcacactgggctcacttctcagaggcccctcatccctgcctctaaacacacaggtagtcatccctgtggatggccacccgcctggaggtctcggtgagagcccatccctttccccagatccctgttgctcaattctgttatgtttgaacacccagtgcccacggtcatgcgcctttggccttctttaaaaatagccttgccagcagttacataaaaatctgaacacacctctcatgtggagatttcctacctactccctgaatcaacgccgagggaagaattaggtctggtttctttcttcctggtagaaacatccaggtcttccctaccctcctactagtctcagacaatgtggaaaatcagtacaatttcctaacatttcttttatttgaggatgtcctatgctccctgctctttaaaaagtaggttagcatcaaaagccatagaaaaaaagactgaaaagtgagactccatgaaattaaaaacctctgtacagcaaaaggcatcacagacctagacgaagaggagtagcctagagaaaagattcactgcatattctattatttagacctgtggttttcacactgggccattctgcccccaaggggacacagggcaatgtctggagacatttttggttactgtgacttggtcagggccaggggtcgggggagggggtgctactgacacctggtgggtagaagtcagagagctgtaaagcatccttcagggcacaggacggccccacaaccaagaattatctaaccccaaatgtcagtactgccgaggttgggaaaacttgattcggaacatctacaaattggtaagggataaaagaagagacgtaaccaagagggaagtaggcaaaggatgtgagcagcaatttataaaggccttaaattcaaatggctcgtaagtccagaaaaagacactgaacttcatcttcgtgaacaatgaggaaaatgcaaaagaaaaccagatgctattttctgccagtcacatggaataaaatccagcgcaagatcacctgctactgatctgagtatgagatggtagaaccttctgactcacaactgcaggatctttctacagaaataatcacgcaagtgcaggagttcaagaccagtctggacaacaacgtgagaccctgactctcaacaaaaaataaaataatttagtgggcatggtgacccatgcctatagtttcagctactcgggagacaaaggcagggaggatcgcttgagcccaggagatcaaggctgcatgagccatgatggcgccactgcactccagcctgggcaacagagtaagactctgtctcaaaacaaaacaaaacaaaaagtgcaaggaaggcactacctcatggttcataagagtataaaactggatagaattctaaatattcgttaatgggaaatggctaaatttcaactttcagtagcagctcgggacctatagactttaatcatgagaaactccacgtgtctgttacaccatctgtggccacgagattttagaatagatcactggctcaaaaacaaacaaacagacaaaaacatttgctggaagctgatccaaacagaccacaagggttaacactgaagaattaaaatgcacattgaagcttgctcaaaatgtaattcaagcatttcccttctttctttctcttttttcctttacctttccttctcctcgccctttctctaagagttaggcatctactttgctttttccctcattctgctttcatggacggtgagatggacaatggctgtcccaggcttactgtccacagtgtggtatcctctaggtctgggaaaagtggacctcctgaaacacacatcatggcctgtggtacaaatctggcccattgcctgttgttataaataaagttttattggaatacagcttgtctcatttgtttatgtattgtctgtctatagatagttttgtactacaataacacagttaagtagtagcaaccgtatggccaaaaaagctgagaatatttaccatctggctcttcacacaaaaaaaatctgccgacctctgttttaaaatgtaaaaacataaaatttcttggagaaaaatctttgtggcattgggctggggaaagatttctcagacacaacaccaaaagcccacttcgttaaaaaaaaaaaaaaatggataaactggatatcatcaaaatttgaaacttttgctctgtgaaagatactgctaggagaattaaaatccaccaactggagtaaacatttgcaaaagggacttgtagtcagaacacttttttttttttttgagtcaaagtctcactccactgcccaggctgaagtgcaatgccataatcatagctcactgcagccacaaactcttgggttcaagcaatcctcctgcctcagccttctggctaattttttattttttgtcgagatagggtctcactatgttgcccacgctggtcttgaattcctggtgtcaagtgatcctcccatcttggcctctcaaagtattagaattataggcgtaagccacctcacccaacccagaacccttttttttttttttttgaaatggagtcttgctctgtcacccaggctggagtgcagtggcatgatctccgctcactgcaagctccacctcccgggttcatgccattctcctgcctcagcctcccaagtagctgggactacaggcgcccgccaccatgcccagctaattttttgtatttttagtagagacggggtttcaccgtgttagccaggatggtctccatctcctgacctcgtgatctgcccatctgcccacctcggcctcccaaagtgctgggattacaggcgtgagccaccacgcctggcccagaacacttttttttaagctctcaaaacagaagcaggctagtgtgctggctcatgcctggaattccagcactttgggaggccgaggtgggtggatcacctgaggtcaggagtttgagaccagtccggccaacatggtgaaaccccatctctacaaaaatacaacaaaaaaaaaattagcaaggcgtggtggtgggcatctgtaatctcagttactggggaggctgaggcaggagaatcgcttgaacctgggaggcagaggttgcaatgagccgagatggcgccactgtactccaaactgggcgatagggccagactccatctccaaaaaccaaaaacaacataatgagcaaacaacctggtttcaaaaatggcaaaagatttgaacagatactataccaaagaatatatatggatggcagacaggcacatgaaaagatgctcaacatcattagtcaaattaaaaccacatcgagacaccgctacccacttattagaatggctaaagcaaaataaaacaaaaaacaaccaacagcaacaaaacagacaatgtcaagtgctggcagggatgtggagaagccagaatattcatgcactgctggtgggaatgcaaaaatgtgaaatgtgacagccactttggaaaacagattggcagtttcttatggtgaaatatacacttagcatgggatccagcaatcctactcctagtattaaggcaatagaaaggaaaatctatattcacacaaaaatctgtatataaatgtgcagagcggcattattcataatcatccaaaactacaacaacccaaatattcttcaagccattcatggataaactgggatacaccatacaacagaataccacctggcaataaaaggtatcaccaattcatgctacttgtgtgaatctcaaacacatcttgccacatcatttctgtgccttcctggaaaaggcaaaaccatagggatggatctgtggtcgctggggttagggagtgaggggaaaagtcgattacacagggacaggaggagggagtatttctgtttgtgggagagcgaactttccaatctttattatggtggtaatcaaacaactttatccgtttgtcaaaactcagagaactctactcgaaaaaatgaattttcctacatgcaaatttaaaaataaattgtctgagtgtggcgactcatgcctttaatcccagcgctttcagaggccaaggtgggaggactgcttaagcctggagttcaagaccagcctgggcagcacagagagatgccatcattacaaaaaaaaaaaaaattaaaaattacccaggaatggtgatgcacacctgtatgcaatcccagctaatcggggggctcagctgggaggatcactagagcctgggaggtcaatactgcagttagctatgattgtgccactgcagtccagcgtgggcgacagagtgagatcctgcctcaaaaacaacaacaaaaccacaataaaaataaattttaaaaggtttaaaaagagaacttctgctttgcggccctgttcctcctgacactctgagtcaaggctgagcagcccctgcaggtcaagttcttggtcaactagtaacacgggagaaaccaacaacctgccctgcaaagcagtttcatgacgtttctgggcccccaccccactctctggaggcccttcccttgaccttctccaaatctgcatcatcaatcctgggccaaatcagcttctatcccacaagctccaaccacaactgggccttgtcaccactcaattatcactgactcccaagtcgtagccacttctgtctctcgaggtgcaaggcctgcactgtcctgcaatcaagatgctcacccctctggtattccctgtcagtggtcaccacccattgaggctcggcggtcacacgatgatgctcacggtcaggcatgccattaataagtggcagggccaggcctcaagttgtcatgacaatgcaactgtcaaactggcaaggcccttcacaatcggacccaggtggttctccagcctcagtcgccaccctcccttcccgctcactccagcttcttgccaatatgctacaggcctctgctttggctgttccctctgcagggcactagtgtcctctccttcacttcccagctcattttttaaaattagtatttttttttaaagagatgggggtctctctttgttgcccaggctggtcttgaactcccaagctcaagtgatcctcctactttggcctcccaaagtgctggaattgcaggtgtgagccaccatgcctggcctcccagctcacttctatttttacttatttttcttttgagaaagggtcttgctctgctgccaaactagagtgcagtggcataatcacggctcactgcagcctcaaactgcctcagtttcccaagtagctgggactactggtgtgtgccaccatacctggctgatttttaaatttttttagagacaggggtctcattttgttgcccatgctggcttcaagtcatcctcccacctgggcctcccaaagtgctgggattataggtgagagccactacaccaggctggctcatctttaaaaagctaccttcctggcctggcgtggtggcttatgcctgtaatcccagcaatgtgggaggccgaggtaggcggatcacctgaggtcaggagtttgagaccagcatggccaacatagtgaaaccctgtctatactgaaaatacaaaaattagctgggcgtgatggtgcatgcctgtagtaccagctactcaggaggctgagacagcagactcacttgaacgcgggaggcagaggttgcagtgagtcaaaatcacgccactgcactccagcctgggcaacagagtgagactgtctcaaaaaaataaaaaataaaaggccaccttcccccaggacaacaggttacttactctagttctcagtgcctccatgccattgctgtaaacctttgttactgtcccaaccactcctatcattatttgccttacactcaatgaccaatgtcagtggtgagaaccttgagggcccaggttataccattgccatctaagagtccccaggcaaagccagggtgtgtcacacagcagtacaggaggctgctggctctcagaccaggctggagtgcagaggcatgatcacggctcactgcagccccggcctcctaggctcaggtgatcctcccacctaagcctcccaagtacctaggactgcaggtgcgtgtcactacgtagtcctactaagtcctctatgtagttctgtctaagcttttttatgttttgcagagaggggggtcttgctttgtcacccaggctggagtgcagtggtgcgatcttggctcactgcaacctccgcctcctaggttcaagtgattctccggcttcagcctcccgagtagctgagattacaggcacctgccaccacgcccggctaatttttgtatttttagtagagacagggtttcactacgttggccaggctgctctggcactcctgacctcaggtgatccacccgccttggcctcccaaagtgctgggattacaagcatgagccaccacgcttggccgcttttttatgttttgtagaggcgggggcgggggggtgtctcgccatgttgttcaggctggtctttaactcctgacgtcaagtgatcctcctacctcagcctcccaagcactgggcttagaggtgagagtcaccgtcggtgcctggcctctgggagaagtcttgtttggatgatctctgaaggtttttgactccaatgcactattttaaacaatcctggttgtctatgtgacatcagtgatgttgttcacatccgtcgatcatctagcgcatatccaggggagagagatgtgtgtgtctttatgtgtgacagaaaaagagtgaagcagtgaggctgctttccaccaggcaagcatgagaatcactttcattgcaccatgacggagcaggtattctaaaccacttgagccagagcaaaactagaacagtcaaatctatcttcaggctcaatcttgacacttcacacatcatctgacagggcttggacccaataatgtttaaggtcctttccagatgcaacattctgagtcttccaggtaaaaaaggcttaggtcattcaggaaatgctctgctgccagaaaaaacccaaagcaccacctgacccagttataaatgccatgcaaggcaaggtctcaggtggacatggcaccagcttcttccaagcccctgcccatggcccacagaagggcaggatgcctggctggagcagctccagctaagtgacaattccctttcagccaggctgagaagcccggggcaggagcaggtcaggtgtggctggcctgtggcccagtccaggcaccccacagccctgctaagggctctggcttctttctggctggtcaaggccaaaggccactgcagggatctcacacagaagtgcaaagcaacagggcatggcaggaaaaaaccctgagctctggagcctggcaggcccgagctgggcactaagtctcctgctcatcagctgaactactgtgcagaagtcgctccccttcccagagcttcagcttcctccactggggatgtcaccccttgctccacagtgcctggtacagtgagtacctgtctctagtcccacttcatgaacaaaatcaaggcgaatgtatgtctccccaacctccctgtctgcagctacaaacaccttcatctcctctcctcctgtccttgccctctcttcaaaccgcctccgccccctgaattacttcatttggtggcatagccccacctgtcccccaagccacctctctctagcccttggacctaatcaagcaccatgtcctgccagtttgacatgtgagatctctcaccgtcctgccacctctctgccaccatccctattcagattcctgtcacctcctgctagaccgactcctaagtgggattgcaaactcagtgtctctaaacccagcttcatcttcttcctcctagtcactccccttccttgagtctgcctgtttctgttcatggtgacatgagtctggccatcgagctgttcaggattgttccctctcctgtgattccttcccctgacataaacgtctcactcttaaaaaaaattttttttttttttagagatgggatctcgctatgttgcccaggctggtcttgaactcctggccttgagcaatcttccaccttggcctcccaagctgttggggttacaggtgtgagccactacacccagccacagatgtctgtttgacaggtacctggatccagtcgcttctgagtagtctgccaatctttcctttccctggcacagacaaaatatcaaccacgtgccaggcacagagcaaagcatcaggcatacaaaatatagaagcagtcccagtcctgaccctcaagcggttcagccattacggggccacctcagtactgcaacagcctgtgactggtttctccttgtctccccccagcctctccaccagggtgagcagtgaactaaaactgctcagtagccacccctggcctacctgcagggtaacagccaagccctctgcccagtggacacctgagcactcctgccaccactacccatctcagccttcttgtccctaaagaacccacgtggttctttgaacacacgatgttctctgaacactgcgatgttcccacctccgggcttggctgtatcctaaaaagccccaccctattgtctttgcctggttagctcctccccaccgctactgcctcctctcctccaggaagcattctgggctctcctgtgcccacccaggtcccttttctgggcttccacatcagccagggcataattctcacagcactcatcagagtgggctgagatgacctacacacatcatgcacactctccagagcctagcgggggcccaggacacagcagcggagcagggagagtcgttcagaggagggagcgagcctcacttccctcccacaggctggcttccgttggtcttcccctgacccacagctcgggtcggccgcaccgcctcgctactgccacctaggggcgccagccgggcgctgcgcttctctcgccattcagccttgaattcgattcaataaactgaatgggatgggaacactaaggagggaacagttgattccggtgcgggtggaggaagagtggcagtcagacgaggcttcaaacggccagtgagctctgggctgagccatggagcataagcaaaggatctccaggtggaagagatctgtctccaggtggaggctgcaacaggcagggagggttagagtttggggtctacgtgcaggggcggggagggttagggtgtgaaggaactggcactccaaactaagggcttctagctttatcttttaagccaccagagaggtcaagaaaacgtgtcttttttctgcacaaagattttaaatcagaagggatacaattagatgtgcatttacagaacagaactcctgctggagtgtggaaagagggaagagatgggaagcggagagtgagagaggcaagaaattttcataaagttttttcataattctctcatttcttttacttgaaatagcaccatgggctgggcgcggtggctcacacctgtaatcccaggactttaggaggccaaggcgggtggatcacctgaggtcaggagttcgagaccagcctgctcaacaaggcgaaatcccacctctactaaaaatgcaaaaaattagctggacgtggtggcggctgcctgtaatcccagctacttgggaggctgaggttgcagtgagctgagatggcacaactgcactccagcctgggcaacaagggtgaaactgtctcaaaaaaaaaaaaaaaaaaagaaaaagaaaaaaaaaaaaaaagaaatagcaccatggtccgggcgcggtggctcacgcctgtaatcccagcactttgggaggccgaggcgggcggatcacaaggtcaggagatcgagaccatcctggctaacacggtgaaaccccgtctctactaaaagtacaaaaaattagtcgggcgtggtagccggcgcctgtagtcccagctactcgggaggctgaggcagaagaatggcgtgaacccgggaggcggagcttgcagtgagccgagatcgcaccactgcactccagcctgggcggcagagtgagactccgtctcaaaaaaaaaaaaaaaaaagaaatagcaccatgatctcagactcaacacatccagactgaaactctgtctgctcaaaaccaatgcatcaacataaacagtattatttccttccacatttgagacgttcgtgtatctcaacctctttgtgggcctcgaagttgcagaatttgataatagatcccagcacagaactttgcacacagaaaatattcgatgacaactggagtgccctggagccttgtgattataggagcagtacaatcgagtggttaagagtaagggttttgaatcagagggcccgagttcaaaccctggcgcagccactttagtgcatgagactggtcacatcaagtgacccatctaagcctcagtttcttcatctctaaaatggaaattaatggaaattataacatcacctgcctcaaggactgcagacaaacgtccacaaagtgtcaagcacatagtaaatcctcaataaatactggtggctatgtacaacatcatttattcagtgcctaccaggcacagaccacgcacaacgcaacgggatttccaccctcttcaatttgcaccacacttttgtccttcccattttatagataagaaaactaaggctcaacagagtcaagcttgttcgaggtcttgggagcatctcccagggcattagaacttttggaggaagagcatttagttcagtaatggttctcacctgtgcgtgtgagagtggaagagacccctcccccgcaacccgagccatctggcaatgtttggagatacttttgatcctcacgacttggagcatggggatactgctggcatctagtgggtagaggccaggaatacggctcaacttcctacattgcacagggaagcccccactaccaccacaaccaaaaactatctgaccccaaacatcagtagggccaacgtcgagaaaccctgctctagacagatcattctcctcatcttcccatttctggccatccggatcttagatgaacactttctagcaagggggctcagtcccaccacgggaagcccatgcagaagttgtgcagaagttcttctccacctgccctgcacacagtagggaccaaaacccattttaacaagccccgcagcccagagcaccggaaaaggaaggaagggcatccatcccccattgttcaactgtgtgcagcttgtgtttccaacaggcacacacacatattttacaaatcctaacgtcccacgccccacaaacagctttgttagagatggcgctcaaaaaaagatgcagtttagattttttttttcccccaggactcccgtgtatctactgaagggtttgcacacttctcaaaggacctcgcaccggccgcggtgctctgacaacgaccacaaaagaatctgtgggatttcccgggggagcaagcccgtgggccgtgacctctgcgcgctcaaagcgttcccggcgctcccccgtagctggccccactctcccgcccccggagcccgggcttccaaggcgaccggggcccccggccgtgcagcccggccccccggcgcatgcccacgccgtatccccctcgcccgtccctcgaggcgccagaggaatccggccccggggcctgtagccggcgcccacaccggcccgccccgacccgcccgccgcggccccagcgcgcgtcccctcccccggtccggcgcggcctgggcctcggccggtgcaggcccgcgggcgccccgcggccaggccaggcgagctcaggcctgccgcggcctaccccgtcgggcgccgccgaaggccccccaccgcctcacctggatgcgggcgggcgggcccggggctgctccggggcgggcgggaggcggcggcggcgcggcgctaacggctccgctcggcctcggtagcggtggcggcggtggcggcgacggcgacggcggcagcggctcctcctcagcgcgcacgacccgctccggcccgcggcccggacacgccccccccgcgcgcgagcccattggccgacgtccgccacggcgcgctgctcattggccggcgtagctgtcgcggcgctccggggcgcgcgggagaggcgggacttccggtcggcgccgcctgcgaagtgctccgcggccggcggagacgcgggcagccagcgatggccgcggagggggcgaactgggttccggccctcggaggctgacggaaggcggtggctgaggagcggcgcctctggttgagcgctcgccgtgtgtcccgcacctgtctgtcctgccgccgcccggtaaggtaggaaaggtcagcgcgccggggttacgggtacagaacctgggttcgaatcccggccccgacgtttccgcactacgtgccgttgggcaggagctgacgtcaccttgccgggcctcagtttccttctctggtgcgctgaggaggcggggcatggaacgtggtcagcgcttcatcggtgctggctctttgagcaagccagttcccgaaggctcagcatctcattcattcattaaaatgtcattgagcgcctactgtgtgtcaatcactgtatgggcagtgagcagaaaaaaaatacctggtcttattgggctaacattctaaaccagcgctggcctagaatgccctagtagaaatacatgcaagctacatgtttaatttttttttatgtaaagatgggctctggttctgttgcccaggctggtctcgaactcctggactcaagcgattctcctgcctccgcctcccaaagagctgggattacaggcatgcctgcactctgcctaattttttcttttttttttttatgatctgaaaataatagtctttttatttttatttatttatttatttatttgagacggagactcgctctgtcgccaggctggagtgcagtggcgtgatctccgctcactgcaacctccgcttcccaggttcaagcgattctcctgcctcagcctcctaagtagttgggcctacaggcgctgcgccaccacaaccagctaatttttgtatttttagtagagacggggtttcaccgtgttggccatgatgatctgtatctcttgacctcgtgatctgcccgcctcagcctcccaaagtgctgggattacaggcttgagccactgcgcctggcctacaattttgtttttctttttttttttttttttttgagacaggatctcactctgtcacccaatttggagtgcggtggtatgatcacagctaactgcagcctcaacttccccagctcaggcaatcaatcctccggcttcagattcctgagtagcttagactacaggatgtgccactatgcctggctaatgttttatttttttgtagcgatgaggtcttgctgtattgcctaggctggtctcaaacttctagacttaagtgatcctcctgctttggcctcccaaagtgttgggattacaggcgggagccacggtgcccagcctgtttctttttttaatcatattttcttagaagttttttttttttttttttttttttttggagacagggtctcactctgctgtgcaggctggaatgcagtggtgtgatctcagctcactgcaacctctgcctccctattcaagtgattctcgtgcctcagcctcccaagtagctgggatcacaggcgtgcaacatcacacccagctaattcttgtggttttagtagagatggggttttgccatgttggccaggctggtctcaaactcctggcctcaagtgatccacccacctcggcctcccaaagtgctgggattacaggcatgagccaccacccggcctaggaaagctttttagagattgggtctcactgtgttgcccaggctggagtgcagtggctgttcacaggtgcaatcatcccacaggtttaactcctgacctcaagcagtccttctgcctcaggctcccaagtagctgggattataggcacgtgccaccacacctagctcaattaaatgttaaatttaacatttaattgttaaattttatagtagccagcattctgggtcatcacggtgcaatagaagtataaacaaagcaggccaggcacagtaggtcacgcctgtaatcccagcactttgggaggccgaggcgggcagatcaccaggtcagtagttcgagaccagcctggccaacatgttgaaaccccagtctctactaaaaatacaaaaattagctggacgtggtggcaggagcctgtaatcccagctactcgggaggctgaggcaggagaatcgcttgaaactggaaagtggaggttgcagtgagccgagatcccgccactgcactccagcctaggtgaaagagggaaattacatctcaaaaaaacagtataagcaagccacagatttgtcagcgaggtatgtaatttaaattggtacattgttagccatgtttaaaaataagtaaaaagaaacgggtgatgttagttgtaatgtgttttatttaactcagtaggttgaatatgttattatttaaacatgtagtcaatattttaaaatacaggatgttttgcatctgttatctttccaaaatagaagatactttgtgtcctttttctttcctgcatgctttttttttcttatttttttgagacagagtctcactctgttgccaaggctggagtgcagtggcgggatctcggctaactgcaacctccccatcccgggttcaagcgattctcctgcctcagcctcccgagtagctgcgattacagacatttgccaccatgcccgggtaattttttgtgtttttagtagagacagagtttcaccatgttgcccaggctggcctcgaactccttaccttaagtgatccacccgccctggcctcccatagtgctgggattacaggcgtgagccaccgcgcctggcccctgcctgcttttgaaatctagtatgtatcttatactccacagcacagcacagcaccgcacatctccagtcggactggctacatttcaagggctcaaccatcacgcgttaccagtggctactgcatcagactgtgcagtgctagatggggagtcagaagagaaaccaagtgatttccatgtcaagtggtgaacaggctaagaagaaaagtaaattggggaaagagcatggggaatgtgggggttgctgtttgaaagaggatggttgggaaggctgaagagctgtcattcgcagagggacccaaaagaggtgagagcactgaacaaatagttacattcttcattgtctgccgcagtgctgtccagaagagcttcccacgataatgggcatgttccatatcagcaccgtccaattcagtagcccctggctccatggggttttctctctttgtttttttctgtttgtttttttttttaagacagagtctcactcttttgccaaggctggagtgcagtggtgtgatcttagctcacagcaacctctgcctcctgggtttaagcgattcttctgcctcagcctcctgagtagctggaactacaggcatgcaccaccacgcctggctaatgtttatatatatattttttgctttgttttgttttgttttgagatggagtcttgttctgtcgtccaggctggagtgcagtggtgtgatctcggctcactgcgagctccatctccctggttcacgccattctcctgcctcagcctcccgagtagctgggaatacaggcgcccaccaccacacccggctaattttttcatgtatttttagtagagacggggtttcactgtgttagccaagatggtctctatctcctgacctcgtgatctgcctgccttggcctcccaaagtgctgggattacaggcgtgagctgcagcgtccgacctatatttatatttttatttattattattattattattattattattattattattattattattattttgagatgaaatattgcactgtcgcccaggctggagtgcagtggtttgatctcggctcactgcaacctccgcctcctgggttcaagtgattcttgtgcctcagcctcccaagtagctgggaccgcctgctaccacacctggctaatttttttgtatttttagtggaaacaggatttcatcatgttgaccaggtcagtattgaactcccaacttcaggtgatccaccaacctcggcctcccaaagtgctgggcttacaggcatgagctgttgcacctggcctccatgtgtgttttgtagggttttttttttttttttgcacttggcacatggttggtaccattaaagaactgactttctggccagacaacggtggctcatgcctgtaatctccagcactttgggaagccaaagtgggaggataacttgaggccaggagttcaagaccagcctgggcaacatagcaagcccccatctctaccaaaaataaaaaaataagccaggtgatatggtgtgggcctttagtctcagctgcttgaaaggctgagttgagaggattcctcaagcccaggagttcgagactgcattgagttgtgatcatgccacaacatttcagcctgggcaacagagcaaaaccccatgtcaaaaaaaaaaaaaaaaactgagcgtaagtttttaattaattcaaatttaaataaccatatagggctagtcgctcctatagtggacagcatagggttggtatagtgttgacaagtcctctgaattaagtgggtccttcatggcaaatgctttatggacatcctcctgtgaaatcctagaaataggccaggtgtggtggctcacgcttataatcccagcactttgggaagccgaggcgggcagatcacgaggtcagcagttcaagacaagcctagccaacatagagaaaccccatctctactaaaaatagaaaaattagccaggcatggtagtgggcgcctgtaatcccagctactcgggaggctaaggcaggagaatcgcttgaacctgggaggtggaggttgcagtgaaacgagatcacgccactgcactccaacctgggcaacaaaagccaaactccatatcaaaaaaaaaaaaaaaagggaaaaggaaacgttttaaactgagattggggtgatgggcaacagagtgagactctgtctcaaaaaaaaaaagaccttattttttagaaaaatttagacccagcacagtggttcacacctgtaatcccagcactttgggaggctgaggcagcaggatctcttgaggccgggagtttgagaccaacccaggtaatatagcaagacccccatctctagtaaaaatttaaaaaatttgctgggtgtggtggcacacacctgtgctcccagctactggggaggctgaggtgggaggattggttaagcctgggaggtcaaggctacagtgagctgtgattgcaccactgccctctattctgggtgacagagtgtgaccctatctcaaaaaaaaaaaaaaaaaaaaagaaaaaagaaaaattttagatttacagaaatacttccaaagtagtagtagagagttaccaggcctggtgcagtggcaggtacttataatcccagctacttgggaggctaaagtgggaggatctctgagcccaggagttgcagaccagcctgggcaacatagccagaccctgtcctttttttttttttttttcttttttttttgagaccgactctcactctatcgcccaggctggagtgcagtggtgtgatcttggctcactcctatctgcgtcttctgggttcaagcgattctcctgcctcagcctcccgagtagctgggattacatgcgcccaccaccatacccagctaatttttgtatttttaatagagatgggttttcactgtgttggccaggttggtctccaactcctgacctcaggtgattcacctgccttggcctcccagagtgctgggattacaggcgtgagccaccagaccctgtgttaaaaacaaacaaaaaaacagagttaccattattctctattagtaacatattttagttacaaatgagtaacatattggtaacaaattaataatgataatttgttgcagttaatggaccaatactgatactttgctattaactgaaggtcagagtttatttagtcttcctttgtgttgccctagtatcttttttctctcccaggatcccacccaggagactatctcactttttttttttttgagacagagtctcgctctgtcacccaggctggagcgcagtggcgcgatctcggcttactgcagccttcacctcctgggttcaagtgatcctcccgtttcagcctcctaagtagctcggacttcaggcacctgccatcatgcgtggctaatttttgtatttttagtagagacggggtttcgccatgttggccaggctggtcttgaactcctgacctcaagtgatccacctgctcggcctcccaatgtgctgggattacaggcatgagccactgcgcctggccagtccatctcacttttagttctcttatctcattaggctcttcttggctatgacagattctcagatttccctagtttttgatgatcttgacagttttgaggagtgccggtcaggtattttggtaagagtgtccctcttttggaatttatctggagtttttctcataagatacacgtttttggcagcaagatcaaggtaataaagtatcaatttaatcacaccatatcaaggatacatcctatcaaatttattatttatttatttaaagagacagggtcccggccgggcactgtggcttacgcctctaatcctagccctttgggagacagaggcaggtggatcacttgaggtcaggagttcgagaccagcctggccaacatggtgaaaccctatctctactaaaaaagtataaaaattagctggatgtggtggtacacacctgtagtcccagctgctctggaggctgacgcatgagaattgcttgaacctgggaggcggaggttgcagtgagccaagattgtgccactacactccagcgtggggattacaggtgtgcaccaccatgcctagctaattttgtatttttcagtagtgacggggtttcaccatgttggccaggctggtgttgaactcctgacctcaggtgatccacccgtcttgttctcccaaagtgctgggattagaggcatgagccaccgtgcccagtccttttttttttttttttttttttttttttttttaatactgtggaaggaagtcactatgcgtagcccacacctaagttgtggaaggttatactctatttatttaagggtagactgtctacataaattttttttaattttagagacagagtcttgctgtgttgcccaggctggagtgcagtggtgtgatcatggctcactgcagcctcaacttcctaggctcaagagatccttccacctcagcctctctagtagctgggactacaggtgcacgtgatcacatctggctactttttgtatttttttgtagagctgggatctcactatgttgttcaggctagtctggaactcctggcctcaagcactcctcctgccttggcctcccaaagttctagggttatgatttgcatcgctacatctggccctacataaattattattattttttaagcttgtccacagctgaaacataagttttctagaatccttccacgtgggagatttatctcgctctcccccacttactaggtcattgaattatatcaggatggaatgctggatatttatttatttatttattttactctggagatggagttttgcccttgttgcccaggctggagtacaatggcatgatctcggctcaccacaacctccacctcctgggttcaagcgattctcctgcctcagcctcccaagtagctgggattacaggcatgtgccaccatgcccggctaatttggtatttttagtagagatgggatttctccatgttggtcaggctggtctcgaactcccgacctcagatgatccgcctgccttggcctcccaaggcagtgattaccgggattaccggcatgagccactgtacctggcctggatgtttattttatgctttgtgttataacccaatactactgtattttgtcggtcaaattgttccagctttggccgtctaccactctttaatttggctcctgtggccctttgacatatccccatcaatgtgtttttcagtggtttttttgtttgttcgttttattcgaagcagttccttaaactttgtggcaacacaaaatgctgcaggcctatcttgtgtatttctgcccttcgtcctagaagcagccatgtctccaagggggccctggttccttttagtagagaatgatattgaaaaccaggatctggggtactggaagtgctcattgctactggaatgttgtttctttagatctttagatcaccaatagcttttttgtttgtttttttgagacggagtctcgcattctcgcctagcctggagggcagtggcgcgatcttggctcactgcaagctctgcctcccgggttcacggcattctcctgcctcagcctcccgagtagttgggactacaggcgcccgccaccacgcctggttaattgttttgtatttttagtagagacggggtttcaccatgttagccaggatggtctcgatctcctgaccttgtgatccacccgcctcggcctcccgaagtgctgggattacaggcgtgagccactgtgcctggcctttttttttttttttttttttaagacagggtctcactatgttgtccaggctggaatgcagtggtgccatcttggctcactgcagcctcaacctcctgggctcaagccatcctcccacctcaacgtcccaagtagctgggactgcaggtgtgtgccactgtgcccacctaaatttttgtattttttgtagagacagggttttaccatgttgcccagcctggtctctaactcctgagctcaactgatccactcaccttggtctcctgaagtgctgggattacaggcgtgagccaccaaacccagcatcaatagctcttttcttttctttttcttttttttttttgtttttgtgaaagggtctgcactcaccagcagtgtgaccttgggcgagtcatttaatctctctgagttttagcttcctcatctctaaaatgggggtgggccagatgtggtggctcatacctgtactcccagcactttgggaggctgaagtgggcagatcatttgaggctaagagttcaagaccagcctggccaatatggtaaaaccccatctctactaaaaatacaaaaattagccaggcatggtggtacacacctgtaatcccagctattctggaggctgaggcaggagaatcacttgaacctgagagggagaggttgcagtaagccgagatggcgccactgcactccagtctgggcaacagagtgagactctgtttccaataaataaaaataaaataaggccggtgtggtggctcacgcctgtaatcccagcacattggaggcaaaggcaggcagatcatctgaggttgggagttcgagaccagcctgaccaacatggagaaaccctgtctctactaaaaatacaaaattagctgggcgtggtggcgggtgcctgtaatcccagctcctcgggaggctgaggctggagaattgcttgaacccaggaggcagaggttgcggtgagccgaggtcgcaccattacactccagcctgggagacaagagtgaaactccgtctcaaaaaataaaataaataaaatgggggtgatcacagtacaggtgatccttgaacaacctgggtctgaactgcacaggtccacttacagctggatttacttccacctctgccacctgtgagacagcgagaccaacccctcctcctcctcttcctagcctactccgagtgaagatgatgaagatgaagaccgttatgatccacttccacttaatgaaagatgaatatattttctcttcctaatgatttttttttttttttttttggagacagagtctcgctgcatcccccaggctggagtacagtggtatgatcttggctcactgcaacctctgcctcctaggttcaagtgattctcctgcctcagtctcccgagtagctgggattacaggcgcccaccaccatgcccggctaatttttgtatttttagtagagatggggtttcactatgttggccaggctggtctcaaactcctgacctcaggtgatctgcctgacttggcctcccaaagtgctgggattacaggcatgagccaccttgcctggcctcttcctaatgattttttaaagtacatcttgttttctctgtcttactttatcataaaaatatatgatacaaataaaatacagaatatgtgttaatggactgtgtatgttatgagtaagccttccagtcgacagtgggctattattggtggttaagttttgggggagtgtgtgttcaagggtcaaccgcacttcctgagggcactgtgagaactaagttaaataacccacttttacaatctttggaaccgggggcaggtggctggggctcacacctgtaattacagcactttgggaggctgaggcaggaagatcccttgaggccaagagtttgagaccagcctgggcaacaaagcaagactctgtctctacaaaaatttttaaaacttaaccaggcagctgggcgcggtggctcacgcctgtaatcccagcacttcgggaggccgaggcgggaggatcacaaggtcaggagatcgagaccatcctggctaacatggtgaaaccccgtctctactaaaaatacaaaaaattagccgggcatggcagcatgcgccggtagtcccagctgctggggaggctgaggcaggagaatggtgtgaacccgggaggcggagcttgcagtgagccgagatcgtgccactgtactccagcctgggcgacagagcgagactccatctcaaaaaaaaaaaaaacttaaccaggcgtgctggcatgtgcctgttgtccagctagtcaggtggctgaggtgggaggatcccttgagctcagaagtttgaggttgccatgagccgtgatcgtgccactgcactccagcctgggtgacagcaagaccctgtctctaaaaaaaattttctaaaaaaacaaaacccaggtctgcttggtctcaaagatctttatttgcctgctctgattgtgagataggaagttcttatctgattttgcccttttatttatttatttttttttgagatggagtctgtctctgtcatccaggctagagtgcagtggcacaatcttggctcactgcaacctccgctgatagcagattacacttttatttttagttttttatgagatggagttttgcttttgtcgcccaggctggagtgcaatggcaagatctcggcttactgcaacctccgcctcccgggttcaagcaattcttctgcctcaggctcccaagtagctgggattacaggtgcgcaccaccatgctcagctaatttttttgtatttttagtagagacagggttttgccatgttggccaggctagtctcgaactcctgacctcaagtgatccacccgccttggcctcccaaagtgctgggattacaggcatgagccaccacatctggctctgttttgctttttttttttttttaaatgagaagcatagtcttgatcctggggagtaggaatcggccacggtagttcggggtactcttgctgtccctctcagtccctgtctgttccttcagcacaagctattgtgagtccaggaggtcaggagacagagaagctgactgagcccaagtccctgttctagaggacatcactgccctgaggcaacgatggacacgtggacacataaatccacccaacgtgacaagggacgggcacagatcggcctcccatggagggcagtgttggggccacattaatccatgaggaagggtcggctaggcagagaagagaggtggggagttccagacagagggaccgacaggagtaacggcacaaatttgtcagggaggatcattcagggagcaggggtgccggttcggaggggagatcacagtgaggtggcactggccttgaggagccctggaaagtcgggcagagaagatctgatgtgatcccatagcccacgtagtcagcccacaacagcccgattcagcccatgcctgttttccggcggcccgtgagccaagaatgatttttccacagttggaaaaataacagtagcgttttgtgacatgtgaaaattacatgaaatgcaagtttcagcgtccataaagtttgacagtaacacagccacgcctctcctttgtgtgtggccaggggacgctcttgagctgtcatagaggcggaagtggtgcacaggacgcgcttcatggatgtgcacactgcctcacacggggccctgcccttccactgtccctgttctgaagttctttatgattgaagggccccaggtttttattttgcatcagaccatgcacattatgtcatgtagggtacacagcaacagagaccgtgtgccctagaaagccccgagtatttgctgtgaagcccttttcagaaaacactggtggatcccccgcagagacttccatgtcctgataccctggaacccatgaatatggtacctcacacggcaggcttaagggtctttttttttttctttaagagatagggtcttgctctgtcacccaggctggagtgcagtggcacgatcacagttcactacagcctcaaaacttttagtctcaagtgatccgcctggcttagcctcctgagtagctggggctacagacataatgcccagctaattaaaaaaaaaaaaaaatagagatggggtctcactatgttgcccaagctggttttattgaactcctggcctcaagtgatactcccaactcagcctcccagtgttgggattacaggcatgagccaccgtgcccaacctggttgaagattttgagatgggccaggcatggtggctcatgcctataatcccagcactttgggaggctgaggcgggcggatcatctgaggccaggagtttgagaccagcctggccaacatggtgaaaccctgtctctactaaaaatacaaaaattggccaggtgtggtggcacacgcctgtagtcccagctacttgggaggctgaggttgccgtgagccaaggtcgcaccactgcacttcagcctgggcaacagagtaagactccatctcaaaaaaaaaaaaaaaaaaaagagatgggagatcattctggatgatgtgggtgacccaatggcatcacagggtccttataagagggaggcaggatggtcagaatcagagattggaagaggctgcactgctggcttgaaggtggaggaaagggccacaagccaaggaattcaggcggcctctagacgttggaaaatgcagggaaatggattctcccttggagcctctagaaggaaccagccctgcgcacaccttgattttagaacctagtaagaactaatttcagacttctgaccccaggattgtaagataataaaaatgtgctgctttgggctggatgcggtggcttatatatgtaattccagcatttttgggaggctgaggtggacagattgcttgagctcaggagtttgagactagcctgggcaatggtgaaaccccatctgtacaaaaaataaaattagctgggcgtggtggcatgtgcctctagtcttagctacttgggagactaaggtgggaagatcaactgagcccagaaggctgaggctgcagtgagccatgatcgcaccacagcattccagcctgggcgacagagtgaggccctgtctaaaattaaaataaatagctgggcacggtggctgacgcctgtaatcctagcactttgggaggctgaggcgggcagatcacgaggtcaggagatcaagaccatcctggctaacacagtgaaaccccgtctctactaaaaatacaaaaaattagcggggcgtggtggtgggcgcctgtagtcccagctactcaggctgaggcaggagaatggcgtgaacccgggaggtggagcttgcagtgagccgagattgcgccactgcactgcagcctgggcaacagagcgagactcccatctcaaaaacaaaaaaaaaccaccaccaccaccaacaacaacaaaattaaaataaataaaataaaatagttgttttaagtcaccagggttgtggttatttgttacagtagccgcaaggaactaaaagggggtgggcattgaaaatttattggccgggcgcggtggatcacgcctgtaatcccagcactttgggaggctgaggtgggcagatcacttgaggtcaggagttcaagaccagcctggccaacatggtgaaaccccatctctactaaaaatacaaaaattagccgggcttggtggcgggcgcctgtaattccagctactctcaggaggctgaggcaggagaatcgcttgaacccgggaagtggaggttgcagtgagctgagaccatgccactgcattccaacctgggcaacaagagtgaaactccatctcaaacaatatatataaaaatacaaatacaagtacaaaaattagccgggcatggtggcacatgcctgtaatcccagctacttgggaggctgaggcaggagaaaggcaggagaatcgcttggacccaggagtcggaggttgctgtgaggtgagatcgtgccactgcactccagcttgggcgacagagtgagatctgtcttgaacaaacaaacaaacaaacaaagaatttatcttttaactgaaagagtttaaaactgagagacttacgtgagtctctctctctttttttttttttttgagacggagtttcgcacttgttgcctaggctggagtgcaatggcgtgatcttggctcaccgcaacctctgcctcttgggttcaagcaattttcctcctgcctcagcctcccgagtagctgggattacaggcatgtgccaccatgcggggctaattttgtatttttattagaggtggggtttctctatgttgatcaggctggtctcgaactcccaacctcaggtggtctacccacctcggcttcccaaagtgctgggattacaggcgtgagccatggtgcccggccgtctctgtctcttaatttctctctttctttcctttctttctgtctcccttccttccttcctttcttttcttttccctccttccctcctttctttctctttctctctccttccttccttccttccttttttccttctttccgcgggaacctggggcaagtagaagatacaacatgagaagggggaggcctccagggaggccatctagacaactgaaagagagacggcaaagtggactggtggccggaggagtgctggagggttctggagagaaggaggctgattccagatgtttaagatgtggggtcagcaggaccctgggtgaccagtgaaatgtggagaaggtggcagccaggtcaattagagacagatgtgggggaaagccattctctctcagaattctggagggttccatatatgggatggagttattctggggacatcataagaaatgggtgtgcctgtcaggcgagcagttcacttgtcagcccccacacagagctgaagcatcatagcccaccccagttcactgcccactctgaaaacagaagccgggcaagctccaaaaagccggaagaaccttctagaagccctgtgttcttctgaggcccaacttcaatctgatgccatctcaagcgccagtgagatcggtcatagaagattagaggctttattttttctcaggcagttgagtttattttcaggttagcagcagtttggagttcgcttcctggatgaggtcagagttggaggggcaggtggccacagtgtgctgtgtgcagagtccttgcagccacgacactttggccgttctaccttgtgcacagttctgtctcaaagagactggccccaaagcaggcacagaaataccaggcttacttacttacttactttatttatttgtttatttttgagatggagtctcactctgtcgccaggctggagtgatctcggctcactgtaacctccgcatcctgggttcaagcgattctcgtgcctcagcctcctgagtagctgggattacaggcacgtgccaccacacccagctaattttagtgtttttagtagagatgggggtttcaccctgttggccaggatggtcttgatctcctgacctcatgatccgcctgcctcggcctcccaaagtgctgggattataggcgtgagccaccgcgcctggcctatttatttatttaagacagggtcttgctctgtcacccaggctggagtgcagtggcatgatctctgcccacggcaacctctgcgtcccagattcaagcgattctcttgcttcagcctcctgagtggttgagattacaggtacccgccaccatgcccggctaatttttttgtatttttagtagagacggggtttcaccatgttgggcagtctggtcgcgaactcctgatctcaaatgatcggcccgcctcagcctcctaaagtgctggaattacaggtgtgagccaccgtgcctggccaccaggcttaactttaggaattacttcactttccccagccgcagttcgtttatttgtacaaggcaggcagtaccggtgccaccacctcgagagcctgtttaaagcaggcaccgagcagggcacttaacgcaccttcttggtggctgtccagtaaacaacgtgggggtcagcgacccagagggcagcacagacctctccaccgcttgtcacagaattgcagcctctctaacaccacgcacaagataacacgggtcactggcctcagccagctcgggacgttttccagagttcactttctggatcctacctataacccttccattcctctctctttctctctctctttctttctttctttctttctctctctctttttctctttttttttttttttttttttttttttttggagatagagtgtcgctctgtcgcccaggttagagtacagtggcgtgatcccggctcactgcaagcttcgcctcccgggttcacgccattctcctgcctcaccccccaagtagctgggactacaggcacccaccaccacgcccagctaattttttgtattttttagtagagacggggtttcgctgtgttagccaggatggtctcgatctcctgaccttgtgatccacctgcctcggcctcccaaagtgctgggattacaggcgtgagccaccgcgcctggcctcttttctttttctctctctctctttctttcctgctttctctttctttctcccttccttccttccttccatccctctttccctctctctctctttctttcttcgatggagtctcattctgtcacccaggctggagtgcagtggtgcaatctcggctcactgcaacctccgcctcctgggttcaagtgatcctcccgcctcagccttccgagtagctgggactacatgtgcgtgtcaccacgcccagctaacttttgtattttagtagagatgggatatctccgtgttggccatgctggtctcaaacccctgacctcaagtgatctacctgtctcggcctccgaaagtgctgagattacaggtgtgagccactatgcccggtctccagaatattttcatcgccccagaaagaaaccctgtacccattacctgtcactccccatccctggaacccactggtctacttcctgactccacggatttttttactccggatacttcatataaatggaatcttatccagtgcattattttgtgtctggcttctttcactgagcatgtttttaaggttcacgtgctattgtagaaggagttagtacttcattccttttcagggttgaatgtaatttcatcctatgccggaggctgagtcaggagtgttacttgaagccaggagttcccttaggcaacatagcaagactctaactttaaaacatctttgaaaaattaagtccgggctgggtggttcatgcctgtaatcccagcattttggggggccaatgcaggcagatcacctgaggtcaggagcttgagaccagcctggccaacatggtgaaagcccatctctactaaaaatgcaaaaattagccaggcgtgatggcgggagcctgtaatcccagctactgaggaggctgaggcaggagaattgcttgaacctgggaggcagaggttgcagtgagccaagattgcaccactgcactccagcctaggcgacagagcaaaattccatatcaaaaaataaaaataaaataaaaattagctgggggttggcagggtgcagtgtctcacccctgtaatcttagcatgttgggaggccaaggagggctgatcacctgagaattgcttgaactcaggaggcggaggttgcagcgagtgtaatggtgcgagcttggctcactgcaacctctgcctcgttggttcaagcgattctcctgcctcagcctccctgagtagctgggactacaggtgcccgccatcacacccagctaatttttttttgtatttttagtagagacaaggtttcaccatgttggccagactggtcttgaactcttgacctcaggtgatcctcccgccttggcttcctaaagtgctgagattacaggcatgagccaccatgcctggccttttttcttttctctatttttgagatggagtctcactctatcgccaggctggagtgatcttggctcactgcaatctccagggttcaattgcctccagggtttgagcaattctcctgcctcagcctcctgagtagctgggattacaggcatgcaccaccacaccagtctaatttttgtggtttttatttttatttatttattttttgagatagagtttctctcttgttgcccaggctggagtgcctcgatctcagctcactgcaacctccacctcctgggttcaagagattctcctccctcagcctcccgagtagctggaattataggcgtccaccaccatgcccagctaattttttgtgtttttcgtagagagggtttcaccatgttcgccaggctggtctcaaactcctgacctcaggtgatccacccgcctcagcttcccagagtgctggaattacaggcatgagccaccacgcctggcctaatttttgtatttttagtagagatggggtttcaccatgttggccaggctggtcttgaactcctgacctcaggtgatctgcctgacttggcctcccaaagtgctgggattataggcgtgagccaccatgactggacttcttcctatttttttttttgttttgttttttgagaccgagtctcgctgtgtcgcccaggttggagtgcagtggcgcgatctcggcttactgcaagctccacctcccgggttcatgccattctccgcctcagcctcccaagtagctgggaatacaggcacccgccactgcgcccgtctaatttgttgtatttttttagtagagatggggtttcaccgtgttaaccaggatggtctcaatctcctgacctcgtgatccgcctgccttggcctcccaaatgctgggattacaggcgcgagccaccgcgcccggccccttcttcctattctttcaaagccaccagttgccctcctatgataacccattatctattaacccatggatctgttaacccaggaatggattaatcagttcatgagggcagaattctcatgacccagtcaccccttaaaggccccacctctgtcaacacggccacatcaaggattaagtttcaacgtgagttttggaggaaacgaacattgaaactgtggcaccaggtgttatcagtctattaagagctcatgcaaattgataagcaccaaaggtgcaaagatcagaaacagacaattcccaggaggataagcggggggtctaggagcctaagagtggatgtattgggcatcaagggagggcctgttggccagggttggtcacagcaaggatcattccaatgctgccgggaccccaacacttgctttctggccaggcgcggtagctcacgcctgtaatcccagcactttgggaggccgaggtgggtgggtcacgaggttaggaaatcaagaccatcctggctaacatggtgaaaccctgtctctactaaatgtacaaaaaattagccgggcgtgatggcgggcgccagctacttgggaggctgaggcaggagaatggtgtaaacccgggagatggagattgcagtgagcagagatcatgcgactgcactccagcctgggtcacagagtgagactccgtctcaaaaaacaaacaaacaaacaaaaaacacttgctttccaaaggggtggctgccacttcaattggaaagaccctttggacaatgcacacccagcatataagagggttcataggccaggcgtggtggctcacacctgtaatcccagcactttgggaggctgaggcaggaggagaattgcttcagtctgggagttcaagaccagccggggcaacatagcaagatcctgtctctatggataaaaaaaaaaaaggtcgggcccagtggctcacacctgtaatcccagcactttgggaggctgagacaggcagatcacctgaggttgggagttcaagctcagtagctctctaaaaatacagatcacctgaggtcaggagttcgagctcagtagctctgtaaaaatacagtaattagccgggcatggtggtgcacgcctgtaatcctggctactggagaggctgaggcatgagaatcacttgaacctgggaggcggaggttgcagtgagccaattgcgccattgcgctccagcctggacaacagaacgagactccatctcaaaaaaaaaaaaaaaaaaaaaaaagagggttcgtagtctgagcttgtgattataccactgaaaattaccccaagccacttgtggaagggctgcctgcagaaggacgtgtcttaggctctttaataagttaccttctggttggaaactacctaaacgcccagcacgcaggctggcccggtaaatcacgcacccataggagttatggtcaggaggcctgtgactctgtagagtggtagtggctcccgggccctgggccaagcgctgtactgatgccctcaaatcctcatggtaacagcctgttcagttctgttcaccccattttacagcaaggggctgctctgggggcagggaggagcccagctgggtgggagatcgtgggttcatggtggcatctgtgggtactccatccaatcaagggtctgaggcttaagaagcttaaatttgggggagatagggacattctcaatggtgcagttaaagcagtggcttcagattctggtgggagaggaaggaactgaggctggggaaagggatgtattggtcttttctttggaaacagtcttgctctgtcgcctaggctgggctggagtgtaatggcacgatctcggctcactgcaacctccgcttcccaggttcaagcgattctcatgcctcagcctcctgagtagctgggattacaggcatgtgtcagcacgcccagctactttttgtatttttagtagagacagggttttgccatgttgcccgggctggtcttgaactcttgggcaacagtgatccgcccgcctcagcctcccaaagtgctgagattacaggcatgagccatcgcccagtctcactggtctttcatctttgttccatcctcattcccattcagcacctgatgtacttctctcttactggggtgcaccccaggggacgcatgactgtgctacagcccacggggtttcagcagggtgcgcagaggacctcaggtggcccttgttacccacactcattccttgccaggtcttccacaggtcaaggagccaggattctggggtttggacaccccattctctggcggatggggctggcctggagcctgggtgggagtaccgggtttcatacatcgggggctcaggcttggggaggggtcacatggaagtcacctggctggccagagcagttgcagccacagcaggtagaaggcaggagccaggactgggtgggcctgcgtgggagggacggccaaaccctgaaactagcctccaccctccagggtacaggggcttccctggacacacactggccttcctcgtcctcctctttataccattgcacccaggtttgtttgtctgtttttagtgacagaggcttgctgtgtcacccaggatggagtgcagtggcacattctcagctcactgcaacctctgcctcccagattcaagcaattctcctgcctcagtctcctgagtagctgggattataggcatgtgccaccgcatccggctaatttttgattttttttttttttttttttttttttttttttagtggagacggggattcattatgttggccaggctggtcttgaactcctgacctccagtgatccacctgcctcggcctcccaaagtgctgggattacagacatgagccactgcacccagcccctggggttttatttacccagatccccactgcctttccttcctgtggctgacatctccctacactgtcccccagaaacacagctgttttgccctcaaccacagctcctgcatccagtgcagggcctggctcttgactgagacatcagcaaatgtgagccctgctctcctgggtcaatgcaggctccttcaggaaggaggcggggatctgtcccccttggcatccccagtgcccagcatggggggcctggcacccatgaggcagccaaggctttcagaccaaatgaacaagcagtgagccctgccttcgagggcccgtcttgaggacaccaggtgggtttatgacatcccagtggacatgaggcccccagggaccagttcctctccggcattggcaccagggcccctgccccactggatcagacctcccaagcttggggtcccttttccagtaggcaagagaggcacccgactcctgcttcagcccaaggagaacctgccgactccaaggggtggccattgaggggatcagtgacgtaagtccttcagaggcagcagggacaaggagctgtagggaaaacagggcaggcctggggttggggggtgtggggtgctgacaaggtgcagacccaccaccccaaccaagcccctcctccgcagatccatcacctctgccccgtgccccatgaatgaaccagctcattccccggcccagtgaccagcacaggctccagacgtttccctcggacattgtctgcctgaccacctcttccagcacagtgaggggcctgggatctggaggccagagtgggccaggcctaggggtggggggaaaaacgtcactattcttagatccctcgtcctccagggcccaggccaggcggagcagtcacattccagaggtagaaaccatcagcccacacaaatgcttgtgttccctgaggaggccaagggtcaccaggaactaaaatcagcttttcccaagaaaggcgggagacagggtggggggcggggggcagggttagaaaggccaaaggtcacccaataaacccttccagctgcccctggtggaaagcccctctgagtccggagggatgaggacagagggattctcgccctctaagctactctgcgggctggctgattcttcctggtagggggcggtcctgtgcagtctagattatttagcagctctctggcagcccaccgcccccccagcctcccagtggtgacagccaaatctctctccaggcacgggccaggtgtcccctggggaaaaatcgaccccagatgagaactgtactttcccaaacagagcttccaggtggcgtctggggtagatatttaggatcctgctgttctatggactctgttctctcagcctggaatcctcttcccgcatagcacaatcccccaccagccctgcaatcttccagaactaaacccacacatcacctccctcaggaagtgtcctgtgggccccccatcttatgattttggcccccacggatgctgtggtaggtaaaataaagcccctttggccagatatggtggcttacacctgtaatcccaacattttgggacgccgaggagggaggatcacttgagcctaggagttagagaccagcctggacaacatagcaagacacagtctctacaaaaaaaaataaaaaaattagctggggctgggcgcggtggctcacgcctgtaatcccagcactttgggaggccaaggcgagcggatcacaaggtcaagagatcgagaccatcctggccaagatggtgaaaccctgtctctactaaaaatacaaaaattagctgggcgtgttggcacgtgcctgtaatctcagctactctggaggctgagcgaggagaattgcttgaacccgggaggtggaagttgcagtgaaccgagatcgcaccactgcactccagactggcgacagagaaagactccgtctcaaaaaaaaaaaaaaaaaaattagctggggccgggtgcagtggctcatgcctataatcccagcactttgggaggccgaggcggatggatcccttgatgccaggagtttgagaccagcctggcaaacaaggtgaaaccctgactctactaaaaatacaaaaattagccgggcgtggtgacacatgccagtagtcccagttctacttgagaggctgaggcaggagaattgcttcaactcagtgggggcagaggttgcagtgagctgagattgagccattgcactccagccttggctacagagcaagaccctgtctcaaaaaaaaaaaaaaaaaaaaaatgctggtcttggtggctcacgcctgtaatcccagcactttgggaggctgaggcgggcagatcacctgaggttgggagttcgagaccagcctgcccaacatgaagaaaccctgttgctactaaaaaatcaaaattagctgggcgtggtggagcatgcctgtaatcccagctactcaggaggctgaggcaggagaattgcttgaactcgaggggcagaggttgcagtgagatgagatggagccactgcactccacccttggctatagagtgagactctgtctcagaaaaaaaaaaatgaggaggcaggagggtcacagtcagaaagagactggaagaggctgcgctgctggccgtgaaggtggaggaaggggccccaagatgagagctgtaggtacctctagaagctgggaaaggctgaaaatggagcctccaggaggaaccagcctcatcaacaccttaattttaggacatctgacctccagtgctgtaaaatcataaatctgggttgctttaagctgctctgtttctggtcatttgtttcagcagccacgagagactcataccagcctcttctctgcagccccgagtcagccctggagagctgccgggcagtcggcctggcatttgcctttcctggcatgagctttgtaacccggcagagctgctggccgtggcaagcatctcctaggagatgggagaactcaatggaaaaaggtttcagagtcagggcttgggtggaccacattccttcaagctttataccatagagagctttgttagggaggtggagaagcagacaaagtgactcgtgttctctccaatttatttatttatttaatttatttattttcagacggactctctctctgttgtccaggctggagtacagtggcttgatcttggctcactgcaacctctgcctcgtgagttcaagtgattctcctgcctcggcctcccaagtagctggaattacagacatgcactaccacacccagctagttttttggtatttttagtggagacagagtctcaccatgttggccaggctggtctccaactcctgacctcaagtaatccgcctgccttggcctcccaaagtgctgggattacaggcgtgagccaccatgcccagcccaaataattgttttaaaaggccaggctggtggctcatatctggaatcccagcactttgggaggctgtggtaggaagatcacttgagcccaggagcccgggattcccaggctgtagtgagctatgatcgggccactgcactccagtctggacgacagagcctacccccatccctgccccccgaaaaagttattcctataaagacccaagggcccaatctttgtttcatggtacctttgttctttatttcttactacttattcatttttaaatattctgaatagtcaaagtcaagatgtagctgactttgaaatgcttccctgccaggtgcaatgactcacacctgtaatcccagcattttgggaggctgaggcaggagaattgctttagctcaggagttcaagaccagcctgggcaacatagcgagatccctgtctctacaaaaaaatgacaaagttagctgggcatgatggtgcacacctgtaatcccagctacttgggaggttgaagtgagagggatcactggaccccaggagtttgagactgcagtgagccatgatcacaccactgcactccaccctgggtaacagagtgagaccctgtctcaatcaatcaatgaatcaacattttaaatatgaaacattttccacattcttcaacatgtcctagggcagtccttgttccctttccctaggacagctcatttttgaattttagaagcaatgctaaagggaaaatgtgtctgtgtgttttttttttttgttgttgttgttgtttgtttttgttttttttgagacagaatctcactctgttgcccaggctggagtgcagcggcatgatcttggctcactgcaacctccacctcctgggttcaagccatcctcctgcctcagcctccctagtaggtgggactacaggcatgcgccaccatgcctggctaatttttgtattttaagtagagatggggtttcaccatgttggccaggctggtcttggactcttgatctcgtgatctgcccgcctcagcctcccaaagtgctgggattacaggcgtgagccactgagcccggccgggaaaatgtgttttaagtttcagttaggccaggtgcagtggctcacgcctgtaatcccagcatgttgggaggcctgtaagaaataaagaggaaagaaacacaaaagttggcttgccagtcaacacaggtttattttagagaaaacaaacctgagaggagtattccaggcaagttgagtcagaggcaaactctcttacagactaagaggtttttttgtttttgggttgtttgtttgtttcttgtttttgttttgagacagagtttcgctcttgttgcccaggctggagtgcaatgacgtgatctcggctcactgcgacctctgcctcccaggttcaagctattctcctgcctcagcctcctgagtagctgggattacaggcatgtgccaccatgcccggctaatttttgtattttttagtagagacggggtttcaccatgttggccaggctggtctcgaacctcgtgatctgcccacctcagtctcccaaaatactgggattacaggcatgagccaccgagctcagcccagactaagagttttaaggattcagggtgggagagtttatcagaggcttggactgcttctgtgtctctttgttgtgcttatctgggagggagagttgcgtgtctgtccccatacatcttcttgcagctgcaggcatacccgccccccaaaaacccccaccgggagtctgcctttggcttccctgtttcagtgcacctgaagggaaaggaatgtgcttattaagtaaggccccactgttttactggggcccattgtatgagggtgaagtttggcaattacccaacagactttccccctatttccctctgtgcccgagctgtcttatctgtgttttactgcctgctctttctggctgcttgtagttagaagataagtgatatccttgaaatgtaagaggctagagagggagctggaacttaaagtggtggggtttgtccaagatgacagtgcttctgctctgtcattccagaccctatagttgtaaaaggacaaggggcgacgtgttctttctggctacttcctgctgttgtggggtggaggggagacacggagagttttttggtcttggattgcctgcaggagcaatattgtgtgtagatgttttggtagttgtctacgaaatggccataaagggtaaaaacattagtcctaggcttttcagcagcgtttttttttttttttttcttttgagacggagtctcgctctgtcgcctaggctggtgtgcagtggcgcgatctcagctcattgcaagctccacctcccaggttcatgccattctcctgccccagcctcccaagtagctgggactacaggcacgcgccaccacgcccggctaattttttgtatttttagcagagacggggcttcactgtcttagccaggatggtcttgatctcctgatctcgtgatccgtctgcctcggcctcccaaagtgttggaattacaggcgtgagccactgcgcctggccttcagcagcgtttcttattaggcctaattggttgagacagaatcaacatttttttcccaatgacaggcagaggcgcatgtttgggaagacccatgtgttatttgtttgttagcaactgttattcctggtatgaggataataactaagccaaatgctacggtaattgagactctgtgtccgatattccaccctgagggtactacagtatatagtccttctgcaaatagtagactaaagcaattcccatgagggtggcatagtaaataatttccattaaaaaggttttaatatttggcttaaaaggagatgtagaaatgacaaaaagtatttggtgaggtaggggtgagactgaaatgagtaatttccacttagttacttatcttttttttttttttttttttgagatggagtcttgctctatcgctcaggctagagtgcagtggcgtgatctcagctcactgcaacctccgcttcccgggttcaagcaattctcctgtctcagcctcccgagtagttgggattataggtgtccatataggtgttctatttttagtagcaacggggttttaccttgttggtctcaggctggtctcaaactcctgacctcaggtgatccacccacctcagcctcccaaagtgctgggattacaggtgtgagccaccttgcccagccacttatcttttatgattttcaggttaagatttgttatttttttttacattgataggacctttctctaggctgttaggggttgctttctccactctttaggctttgagtgtaatgtatccaggagttgatttctgtaacacatataatttaaactgtagaaaataataaaaattgaaaaacattaggcaagactagaatttaacaacaggtgtgctatagtttctgaaacataattttcactcttcagtttcccatttttattaaaagataaatcatggtaggactggtttgctttattatatttggcttaattatttgcatagagtgcagcaagaataattatttgctacataggccttttttttctctttttttctttttctcgagacagagtcttgctctgtcacccaggctggagtgcaatggtataatctcagctcactgcaacctccgcctgctgggttcaagcatttctccttcctcaccctcctgagtatcagggattacaggtgccagccaccaagcctgctaattttttgtatttttagtagagatggggtttcaccatgttggccaggctggccttgaactactgaccttgtgatctgcctgccttggcctcccaaagtgctgggattacaggcatgagccaccacacctagccgctacacaggccttttaaatcagctttgatggaactttgttatatagaaggaatttgagataagacttgtttaagccaagcccagccatggatttgtaacatgaaatacctatgagttgggtgaattcctctcctcttgaggttttaagataacttggggttcctggcctgtcagaaaatgaccttctttacttaccacagatcagaaaccctgtacaggaactgtatacacaaaatataaggccagtttccaagggctttattgactccataagtcactcaaggttaggagttcgagaccagcctggccaacgtggcgaaaccccgtctctattaaaatacaaaaattagccaggtgtggtggcatgcgcctgtaatcccagctacttgggaggctgaggcaggacaatcccttggatccaggaggaagaggttgcggtgagctgagatcgcaccactgcactccagcctgtgtggcagaaggagactccgtctcaaaaaaaaaaaaaaaattagctgggcatggtggcgggtgcttgtgaattgcttgaatccaggaggcagaggttgcagtgagctgagatcgtgccactgcactccaccctgggcaacagagggagactctgtctcaaaaaaacaaacaaaagaaaggaaattcacagtcaaatggacacctaccctatgcagcacccttaaccctttcagtagcagctaaaataggaagatcaggctgtgttgccttggcgtcccctggcctccgctatcagcccgggggtccaccatgcctcttcctgatgccagagataaggagggctgggggcaccaccttgaacaaacagcctcacgtcagaggtgatggaaagaaggctgtgatacagacactcatggggccgtgtttctgcagctgaaagagtgagagctgtaaggagcgggggctaaggctgttcagcttaaattgggagccagtgcaggggtttaggaccaggaggcgagagaggggacaatgaggcaggatgggatgggggagctggatttctttggcatgggggaaacttgagagcaatcctggcatttatccatctgttgccagagggagcagctgtggaaccagggaagggaaaacaacaggtggtcatggaagagagagggtgatgtatgaatcgtggttttaattttctgtgcttatgatactttagatctagggctttgaagaccaggagagggacggacggtcccttctggggctggccagttcctagagatagaaacacttccctccaagtgtgccttttctattctgttctgttctgttccctttccttttcttttcttttccttttccttttcttttcttttccttttccttccttcctttcctttatttcctccttccttccttccctccctcccttcctccctccttccttcctttcttccttcttcttggctttctttcttctttctttctttttttggctctgtcacccagtcgcccaagctggagtgcagtggtgccatctcagctcactgcaacctctacctcccgggttcaacaattctcctgcctcagcctcccaagtagctgggacaacaggcgcacaccaccacacctggctaatttttgtatattttttagcacagatggggtttcaccatataggccaggctgctctcaaactcctgacctcaagtgatctgcttgcctcagcctccaaaagtgctgggattacaggcgtgagccactgtgcccagcttcttctttctcttttctcttttctttctttctctctcccttccttccttcctttctctctctttccttccttccttctttctctttctctctctctctctttccttccttccttccttcctttctttctttcttcctctttccttcttttttgagacagagtcttgttctgtagcccaggctgtagtgcagtggtgcaatcacagctcactgcagcctcaactttccaggctcaagcaatccttctgcctcagcctccctagtagctgggactgcagatgtgtacaactatgccctgctcattttttttttaaagatggggttctgctatgttgctcaggctggtcttgaactcctaggctcaggtgatcctcctacttcaacctcccaagtagctgggatcacagatgtgtgccaccacacctggctaatttttaaattttttgtagagacaaagtctcactgtgttgcccaggctggtctcaaactcctgggttcaagtgacccttccacctcggcttcccaaagtgctgggattacaggtggcagccaccgtgcctggctgggaagcatttcaaagtcggctacatcttgacttctactattcaaaatatcaacaataaataaaaaataaggaacaggccgggagcagtggctcatgcctgtaatcccagcactttgggaggccgaggcgggtggaccacctgaggctaggagttcaagaccagcctggccaacatggtggttcactctccaagctctccaagctggtgaccttgggagctatatgttaaagatggcagagccagaagacggaagggacctgtgttctggaaacagccctcagagaagccctacctgccaatcaggaacattcatcatggactttacatgactgtggtggatggtatcatttgttcacaattgcctttgtttaaatgtatgtgtccctccaaaattcatacattggaactaaaaacccaaggtgttagtattagaaggtacagcctttggaacatgattaggtcatgagaactctgccctcatgaatgggattaatctcattagaaaaggctgggtgaggtggctcatgcctgaaatcccagcactttgggaggctgaggagggaaggattgcttgaagccagaagtctgagagcagcctgggaaacacagcaagtccccatctttgcaaaaaacaaaaaagttagctgggtgtggtggcatgctcctgtagtcctagctccttgggaggctgaggacttgatgattgcatgagcccaggagtcaaggttacattgaactatgatcacacccctgcactccagcctgggcaacatagcaagaccctgtctctaaaaaaagcaagagaggggggttgaaggggagcaggtaggtcctttttacctttctgctgtgtgagggtgcagcaagaaggctccaccttgggaggagagaatgagccctcacccaggtactgaatcctccagtaactccatcttggacttcccagcctctagaactgtaagcaataaacttctattattgacagattacctggcctcaggcattttgttatatcagcacaaagagactaagacaacacatcttcctctcttcctcccctgatcactgctccctgtgggtggggtgcactccccattctccagcttagggtgtggccatatgacttgttttggccaatggaacctgcatggaagtgaccctcatcagatcggagacaaaggctgaggaagcatcacgtggtcccgccactctgcttgcatgtcaccttgccatgaaacaaatatgggccctgatgggtcacctgaggtcaggagttcgagaccagcctgcttaccatggtaaaactctgtctctactaaaaatacaaaaaaattagctgggcacggtggcggatgcctgtaatcccagctacttggggggctgggaaagaatgaaactccatctcaaaaacaaaaaaacaaatatgggccctgaagcctctgaatgaaaagtcacatggaacagatgcaaatccaactcacagcctggagcaagttccagtggggctacaggtgacccccagacccacaaagggaaaatcattgctttttatttatttatttatttatttatttatttatttacttatttatttatttattttttgagacagactctgctctgttgcccaggctggagtacagtagcatgatctcagctcactgcaaactctgcctccgggttcaagcgattatcctgccttagcctcctgagtagctgggactacaggtatgcaccaccacggcccagctaatttttgtatttttggtagagatggggtttcaccatgttggccaggctggtctcaaactcctgacctcaggtgatctgcccacctcggcctcccaaagtgctgtaatccaccatggccaggcttattttatttttttaaaacaaagccaaacaaaacaaaaaaaacacttggggccaggtatggtggctcacgtctatactcccagcattttgggaggccaaggcggatggatcacttgaggtcaggaaaaatgtctctcctaaaaatacaaaaattagccaggtgtggtggtgggcgcctgtaatcccagctactcaggaggctgaggcaggggaatcacttgaaccagggaagtggaggttgcagtgagctgagattacaccactgcactccagcctgggtgacagagtgagactctgtctcaaaaaagtaacaacaatacttggcttggctaccctgatcaaatcacaaattcctcatgtgtagaatgggaataagtatattgtttaccttaatgtgtcactgtaagcatctattgcaacaatgcacatgaaattagcccagaacaagggaggcacacaagtaagtgtggggtgtagggggaagtgggaaagctgggggaaaggggggcctgacaagagttttttttaattttatttttatttttatttttattttatttttttgagacagaatttttctcttgtcacccagattggagtgcaatggcacaatcttggctcactgcaacctccgcctcctgggttcaagtgattcttctgcctcagcctcctgagtagctgggattacaggcacaaaccaccatgcatgctaatatttttgtatttttagtagagatggggtttcgctttttttttttttttttttttttttgagacagagtcttgctctgtagtcctgttgctctgtcgcccaggctggagtgcagtagcacgatctcggctcactgcaacctctgcctcccaggttcaagcgattctcctgcctcagcctcctgaatagctgagattacaggcacgtaccaccacgaccatctaatttttgtattttttgtagagacggggtttcaccatgttgatcaggctggtctcaaactcctgacctcatgatctacccacctcggcctcccaaagtgctgggattacaggtatgagccactgtgcctggcctgggtttcgcttttttttttttttttgtatttttagtagagatggggtttcgctatattggccagggtggtctcgaactcctgacctcaagtgatccacccgcctcggtctcccaaagttctgggattacaggcataagccactgcacccagccaggactgagaagagtttataggcctgtgaagggctggacaagctgagagctcccttgggcacttgggggcctgcagcaaggaggcttggtccactctcaagtctgaggtgcttgctcagcctctattggtggggaaggggaacatcacaggcaaagggatgactgaagtacatcccttccatgaggtttgatggccttgaagtggaggcacgtacacaataagatttcaggggcagacagagatgaatagggcagtcccggccaggcaggtgactcacgcctataatcccagcactctgggaggccgaggcgggtggatcacatggtcaggacttgagaccagcatggccaagatggtgaaaccccatctctactaaaaatacaaaaattagccaggcgtggtggcaggcacctgtaatcccagctgctcgggaggctgaggcagaaaactgcttgaacccgggaggtggaggttgcagtgagttgagatcatgccactgcactccagcctggtcaaaagagtgagactccgtctcaaaaaaaaaaaaaaaagaaagaatagggcggtcccaacatgtggcccagggtgacagggtgtcagagctcgaagctgaatacataatcccagccatgctggctgcctggagatgggcagagggagggcttgccaggcagagtgcgctactagggcaaaggctcagcaggagacaagcggaggtgggagccctgggggaacagcaggtgccgtgagagaagaggcaggaaagaggaaccgtggtgacccaatcttcctccccagcctcctctccagcacctcgcccccaggactgagtgggcaactggcagatctgaatccacgtgcttagaacaaccaggagaggccagagaaggtggctcatgctagtaatcccagcactgtgggaggctaaagtgggcagatggtctgagcccaggagttggaggctccagcaagctgtgataacaccagcactccagcctgggcgatagagtgagaccctgtctctaaaaacaaaaaattggccaggccacggtggctcacgcctgtaatcccagcactttgggaggccgaggcgggcggatcacaaggtcaggagatcgagaccatcctggctaacacggtgaaaccccgtctctactaaaaatacaaaaaattagctgggcatggtggcgggtgcctgtagtcccagctacttgggaggctgaggcaggagaatatcatgaacctgggaggcggagcttgcagtgagccgagatcacaccactgcactccagcctgggtgacagagcaagactctgtctcaaaaaaaaagaaaaaaaaagaaaaagaaaaagaaaatattggccaggcacggcggctcatgcctgtaatcccagcactttaggaggctgaggcaggtggatcacttgaggtcaggagtttcagaccagcctggccaacatggtgaaaccccatctctaccaaaaatgcaaaaattagccaggtgtggtggtgcgcacctgtaatcccagctactcaggaggctgaggcaggagaatcacttgaacccgggaggcagaggttgcagtgagccaagatcctgccactgcactccagcctgggcaacagagcaagaatctgtcttaaaaagggccaggcacggtggctcacgcctgtaatcccagcactttgagaggccgaggtgggcagatcacgaggtcaggagatcgagaccatcctggctaacacggtgaaaccccgtctctactaaaaatacaaaaagaaattagccgtgcgtggtggcgggcgcctgtagtcccagctacttgggagactgaggcaggagaatggcgtgaacccgggaggcagagcttgcagtgagcggagattgtgccactgcactccagcctgggcaacagagtgagactccatctcaaaaaaaaaaaaaaaaaaaaacagaaaaagaaccacaggaagacgggttggaggagcagaggtgaaagcgcagacagattccctaatcctataggcactgacagcctcctgggttccctttgtatgcatggccggcctactggactgccagggttcccacatttgagaagtaggtagcagtgggagggaggtttgtctgattctccagggagctaaggaggcggctcagatcgcccccgtcattccagaaagagagacctaattctaggatctgcccaccttcacccagtgggtccagcatgccactttctttttttatttttaattaattattttttgagactgagtctcgctctgtcacccagcctgcagtgcagcacgcagcgcaatcttggctcactgcaacctccacctcccgggttcaagtgattctcctgcctcagcctcccgagtagctaggattacaggcacccgtcaccatgcctggttaatttttgtatttttggtagggacaggggtttcaccatgttggtcaggctggtctcgaactcttgacctcaaatgatccacccgcctcggcctcccaaagtgctgggattacaggtgtgagccactgcgccccatcctgtttttatttttttcagaggcagagtctaactgtcgcccaggctggagtgctgtggtgcaatcatagcccactgcaaccttgaactcctaagctcgagcagtcctcttgcctcagcctcccgaatagctgtgacaacaggtccacactaccatgccctaccatgcctgggctgttgaatctccctgccctcacctcaccctctgcggcatcttccagatgaccttggcagagctcagatgcagacctgaccacaaccctcccctgactaaatacatctattcagggtgggtgcggtggctcatgcctgtaatcccagcactttgggaggccaaggcgggcggatcacctgaggtcaggagttcgagaccagcctggccaacatggtgaaaccccgtctctactaaaattacaaaaattagctctgcgtgatggcacgggtctgtaatcccagctactcgggaggctgaggcaggagaattgcttgaacccaagaggcagaggttgcagcgagccgagatcacgccactgcactccagcctgggccgcaggactctgtctcaaaaataaaaataaaaataaataaatcttttcggcagcttcttcttggcctctggatgaaggtcacccttctgggcttggcacgtgaggctccaaatagcttctccctgcctacctcatcttccgctatccacccccgcacctcctgccccagatactctgcacttggcagttccctctagcgtcctgccctgctggtctctgactaacacgaggttgtccttcaggtcaccattcagctgcaggtccccctggagacaggtgggatgcccttcacatccccacagcctgatgcagatgttcctccaggaatgtctgatcaggagacatggcagcctaaggcagagcaaggtggctcaggcctgtaatcccagcactttgggaggccaaggcgggatgatcccttgagcccaggagttcaagaccagcctgggccacataaggagaccctgtttctacaaaaagttacaaaattagtcgggcatgatggcatgtgcctgtagtcccagctacttgtggggctgaggcagggggatcgcttgaatccagaggtcaagactacagagagctgtgatcataccaccgcactccagcctgggcaacaggaacattatctcggccaggcacagtggttcatgcctgtaatcccagcactttgggaggccaaggtaggcggatcgcttgaggtcaggagttcgaaccagcctggccaacatggtgagaccccatctctactaaaaatacaaaaattagccgggtgtggtggtgcgtgcctgtaatcccagctactggggaggctgaggcaggagaattgcttgagcctgggaggcgaaggttgcagtgagccaagatcgcaccactgcactccagccttggcaacagagtgagactctgtttcaaaaaacaaacaaacaaacaaaccaaaaaacaaaaaaaaacccaaaaccaaaaacaaatcagagacattatcttgaaaaaaaaatcctcctattagctgtgagggccacttggagagtggtattatctgccttctgtctccagctctctgcacatcactgggcacctgtttttacttacttaattaatttgtttagagacaagcgacttagtcaagttacttggtcaagcaatgtaacctctctcagcctcggttgattgttctttccctataaagtaggaatgaattttaacctaataaggttcttgttacctcaagccactctctttaaaggcatccactagctgggcgtggtggtacatgcctgtaatacttaggaggctgaagtgggagaatcacttgagcccaggaggtggaggttgcagtgagccgagatcgcaccactgcactccagccagggtgacacagtgagaccctgtctcaaaaaaaaaaaaaaaaaaaaaaaaaaaaaacggcatccagcccatccctagtctcttccaatcacaccagcattggtgacagtgatcctcatctgaaaattgtttttaaattttttttaaattaaaatttgtttttccttgtcagcagaaagtcacatctgaatgtcttgcttcattacttgctgcttctcttgtctgcaatgctactaggcactgagcacgtgggactgactccttcactgcttgtccccagcacccagctcagtgctgggcacatagagggtgctcaataagtgtttattgaatgaataacaaatggtcccacatagatgttccatgaggcatctgtgacatcaacatcatcatttttttttttttttgagatgagttcttactctgttgcccaggctggaaggcagtggtgcaatcatagctcactgcagccttgaactcctgggatcaagcaatcctcctgccccagtctcctgagtaactgggactatagatgccggtcactttgcctggctatttaaaaaaaaaaaatttttttttttttttgtagaaatgggggtcttactatgttgcccaggctggtttcgaactcctgggctcaagtgatcctcttgccttggcctctcaaagtgttgggattataggtgtgagccaccacgcccagccagcgatcatcatctttgatagttgcaatgtgtcggcttgctcactgctgtcaccctggggcaccctggggccccgcatgtggctggaacataagggatactcagaaaacagatgtggaaagggtgagtagagctcagcacgttcaaagagggactcaggaccctatgggaccctctccccaaggcctgccaccctctctctccatgcaacccctcctctagcccaaggcagcagggccaggatcaggcagtcactcttcccagctgtctggcccccgcacatcctgcaggggcaggacaagtacaaggatgaaagccaaggtcatgagctcggtaataccagtagtctgaatccctctggagaaccacggcccctgcccaggccactgctacagctgtcccctggaagacagaggcctcaggttagcctggggtggggatcccctcagaactgactttccaggagccagcagagccagctacatcagggacttagggttcaggttagagttaaccaaattctcgaacatcaggccaagggcttgcaagacatcctggaaaaacccttcttccttcctcctccttctcctcctcctccccatcctcctcctccccctcctcctccttctcttcccactcctccttctcctccccccccttctcctccccctcctccttctcctccccctcctccttctccccctcctcctcttccccctcctccttctcctccccatcctccttctcctcctccttctcctcctccttctcctcctcctcctcctcctcctcttcctcctcctcttcctcctcctcctcctccttctcctcctccggttgctgggcaaccactatgcatctggaccaaagcaagaggcagctggtttaaagacacacatagactgaaagtgaagggaggcaaaaagatattctttgaaaatgaaaaccgaaagagatcaggggtagctgtacttgtatcagataaaatattttttaagtcaaaactctaacatgagaggaagaaggtcattatagaatgaaaaaggggtcagttcatcaagaggataaaacaattatatatatatgcacctaacatcagagcacctaaatatataaaggaaatatatataaaggaaatatgaacagatctgaactgcaatacaggaatagtactgcactttcaacaatgaacaccagcctgggcaacaggccacaaaattaaaaatatacatttgtgggttgtggtggtgcatatctgtagtcccagctacttgggaggctgaggcaggaggattgctggagcccaggagttcaaggctgcagtgagccataacaacatcactgtactccagcctggtggacaaactgagactctgtctaaaaaaaaaaaaaaaaaaaaaaaaggcaacgaacagatccaggcagataatcagtaaggaaacattggatttgaaatgcactgtagatcaaatggaactaatgacatatgtagaacattccatttgacagcagcggaacgcacattctcctcaagtgcacaggggacatactccaggatagatcatgttagaccacaaagcaagcctgaacaaatgtaagattgccaggtgcggtggctcacacttgtaatcccagcactttgggaggtcaaggcgggtggatgacgaggtcaggagatcgagaccagcctgaccaacatggtgaaaccccgtctctactaaaaatacaaaaaattagccaggtgtggtggtggcgggcgcctgtagtcccagctacttgggaggctgaggcaggagaatggcgtgaacccgggaggtggagcttgcagtgagccgagatggtgccactgcactccagcctgggcaacagagtgagactccgtctcaacaacaacaacaaaaaaacaaatgtaagattgcgattgtatcaagtatcttttctgaccacagtgatacgaaactagagatcaataacaggaggaattctggaaaattcacacgtgagaattcaacaacactctcctaaacaaccaatgtgtcaaagaagaaattaaaacgaaattaaaaaatatcttgaggccaggtgcagtggctcacgcctgtaatcccaacactttggtggctgaggcaggaggatcacctgaagccaggagttcaagaccagcctgggcaacatagtgagacgctccccccatctctacaaaaaataaaaataattagccaggcatggtgatgctcacctgtagtcccagttatttgggaggctaaggtgggaggaacacttgagttggaggctgcagtgagctacgattgtgccactgcactcagcctgggtgatagagggagatgtttctaaaaacaaaataaaacaaacagaaacaacaacaacaaaaaacttgagacaaactgaaatggacatacaatatacctaaaccaatgaatgcagcaaaagtggttctaagagggaagtttatagcaataaataaatgcctacataaaaaagaagaaagatctttcaaataaccaaattctctttaaaaagaggtaactggaggctgggcatggtggctcaagcctgtaatcccagcactttgggaggccaaggccagcaggtcacttgaggtcaggagttcgagaccagcctgggcaacatagtgaaatgtagtctctcctaaaaatacaaaaattagccagacatggtggtaggcgcctgtagtcccagctactcgggaggctgaggcaggagaatcgcttcaacccgggaggtggaggttgcagtaagccaagatcctgccactgcactccagcctgggcaacagagcaagactctgtctcgaaaaaaaaaaaaaaaagaggcagctgtgggtacaacaggagtccaggcctggcagacggggctcctggggtgtggattgctccctacaagactcgtgaccatgcagggcagtgggggcccatcagaagccaagagtctcatcagggacctggaggcaccagagttcaggagagctgcaggcagctggggtctgatatgcaaaagtgactacaggaggacccccacttctgcccatagtgttctcccagtgcccctgagcctttgccgatgacctcccagtcatctgctctatggcgcttccccattgggggactgtccttttcttcacagtatttaagaaataaaaattagattttcctggccaacaaaaaaagtaagtaacttggcttctctgaccctcaatctcctcctttgcacagttgggccaatggtgagcacccaggagcatccttcatcccactagaggtgcctgccactgggtagggcagatgtggtggtggctggtgcaggcttcccagaacatctcatcgcccctgcccaccacctggccactgcaaccaactgggcttgtctagaaagacacctgcctacccacccaaccctgcaggctctggggtattggtctctgaatttggctgagctacaggatggagaccaccctcaactgctcccatcatcagaggtgcagaacagaagtcggtgtggggggcacttgttccccccagctgtgctgatttcacactggcggagaagaggacccttgctgatagcggactgctcttttatttttttatgagatggagttttgctcttgttgcccaggctggagtgcaatggcaagatcttggctcactgcaacttccacttcctgggttcaagcaattctcctgcctcagcctcccaagtagctgggattacaggtgcgcaccaccatgcccggctattttttttttttttttgtatttttagtagagatggggtttcaccatgttggccaggctgatctcgaactcctgacctcaggtgatccgcccgcctcggcctcccaaagtgctgggattacaagtgtgaaccactgctcccggccgatagcggattactcttaatgcccccagctgctgcaggagtggaagaggccagtccagccccgactgtgaaggtctggcctttactcaaagcaactgtggtcctcagaactccgggatcatcccgtttcttgctccaacccctgggtcccaggtccccagcgcgcccaccccagtgctccgtgcttgctggtccctggagggcccccttactgggaacccttcctccccgtgaaggctgccggcgggacaaacagtgaggggtgaggcagggagggagactcacgttggggacctcccccaagtctgggtaacaccgtcttggccgcggcccgcgggttgggaaggtagggggcagtgagccgtagcggagaggctggccccagcccgccacgccgcttccccacgctcgcagccacgcggagccgcgtcctggtccagcctcacccacccagagcaagaggcggaggaactggaacagcgccccggcccgtgggctgccactggccgcagcaacgggacgggtgagagcacctgcccccgacgcgtcttaactgctctggtggggcggggctgaccgtgcaagccccgccccagtctaagcccctcctacaaagcccggccccttaccataagcgccatctgtcaggctccgcccactgtcttaaatcccactcactctgccctgcccctgactcggagccatatagcaagccccgcccatagccataagccacgcccacccagccctgcccctgggctctaagtgtcatttatctagtcacgtccccggctagaagccacacccaccaggcccggccccacctctaagccccactcacccggccatgtggtttgggacagggaagtaggctaggggccgccgcctctgggctcccagtggaaggggagaaatgagaaaggagtttaggatgtgataaatacccacagaggtcagatgtagctatggatgcaggcgataaaaagtttaaagcaatcagctgtgcggcctctgcagcgctcctttcgccctccctaatcttcacctcgtgtctcccccagtccctgtgtcctggctgggtcctgctgccccagggaaagaagacatgccttctcccatcctggctaacatggtgaaaccccgtctctactaaaaatacaaaaaattagccaggcgtggtggcgggagcctgtagtcccagctactcgggaggctgaggcaggagaatggcgtgaacccgggagacggagcttgcagtgagccgagacagcgccaccgcactccagcctgggcaaaagagcaagactccgtctcagaagaaaaaaaaaaaagacatgccttctcggtgaatgttgctttgcttcctgagggcatggctacccggggctcctggcttttcttccaaaaacaaaacatttcttccattttttctttttcttttgtttttttttttttttttttttttgagacagagtttcactcttgtcgcccaggctggaatgcagtggcccaatctcggctcactgcaacctccgcctcccgggttcaagcgattctcctgcctcagcctcctgagtagctggaattacaggtgcccccccaccacactcggctaatttttgtaattttagtagagatggggttttgccatgttggccaggctggtctcgaactcctgacctcagaggatccgcctgcctcggcctcccaaagtgctggtattacaggtgtgagccactgtgtccggccaccgtttttttttccattttttgagacagggtcttgctctgttgcccaggctggagtgcagtggcatgatcacagctcactgcagcctcaacctccaaggctcaagcaatcctcacacctcagcctcctgagtggctgggactacaggtatgcactactacgtcaggctaattttttaaaaaatttttgtagtgacgcaggtctctctatattgcccggggtggtcttgagctcctgggctcaagcaatcctctggcctcggcctcccaaagtgttgggcttacagacatgagccaccatgcctggcctagagagtttctttcttgttggggttgttcaccggtgggaggtgcaccattgtgccgtgctgactatattcatagagttatgtaaccatcactctcatctaatttcagaacaaaaggaaacccataccctctcacagtcagtccttcattctcccctccccccatcctgtggccaccgctaatttactttctgtttctatggatttgcctgtgatcacaaccagaggatttctgtgacatgctaagttacctaaccatggtgtggaaggagagggaaatggagtgaagttggggacccaccagggaacaggtggcttgagggcggggggagcatgaaggtaagggcttgtttgggggctcaaggcagtctgagccttgttcgcaggcagccagtgtccaccaggtgtgtgcaggtgagggaaacaggggaaaaggccctttctggagacagtaggggtgctggctgggaggcctgggatggggagtggggaggcaagggggcctgtgggtcgaggttggagcttgctgtagaagagggagaattccagaggctgagagtgcaggtggagaggaggaggaagggaggagggcgggcagggggtggctgggtggggctctgtctataaagagtgaagctcagcgtgttggtcctgcagatgggacagcttggcctacagcccggcgggcatcagctcccttgacccagtggatatcggtgagtcttttccttgaacatgactgagatgaacagcttttccctccagcacaacttgttcctactttatacaacctccttcccttgccatatgcctggggcttaagaggggggatgttcccagtacccactcccctcctcttcctcagtccttaccacttccctccacgaccccaggtggccccgttattcgtccaggtgcccagggaggaggacccgcctgcagcatgaacctgtggctcctggcctgcctggtggccggcttcctgggagcctgggcccccgctgtccacacccaaggtactgtgttcggcaatgcctaccaccaagtgcccctctccccatgcccccaccccaccccttttgtctcttatctcctccggaagtctccccaatcccatctccactgaattctcccgctcctgacatgcaggaactcctggtgtttggttagctcttgggatggggtcggggagatggagagtccccagttccttcttcgagagccccatggagtcttttgcaagactcctaaagatgtgagggagcagagggtggcttccagctgtgggcaaagccagttactgccagggatgtattgtagaatcctaatcctgccgagccaggggtggggttggagatcagggccctggagactgacaagagtggattcccatcctggtccctccatgcagtccagctgagagttagttgctcctaaaccatttttttttttttttttttgagacagagtctcactctgtcaccctggctggagtgcagtggcgcgatcttggctcactgcaacctccgcctcctgggctcaagcgatccttctgcctcagcctcccaagtagctgggactacaggcgtgtgtaccatgcccggctaatttttgtattttttagtagagatggggtttcactatgttggccagagtagtctcgatctcctgatctcaggcgatccgcctgcctcagcctcccaaagtgctaggattacaggtttgagccactgtgcccggcttcctaaacctttaggagcctccgtttcctcagctgcaaagtgggaatctaaaattcccactgcatggctctgacttgagggtccagtgagctcatgcctgcaaaagactaggcctcatgtctggcggcggcaatagtaactgttcctgttattaatagggaactctttccttcttccccactccctaccgcagagcaagcacttgaggatttcagtcgccaaaggacaattcctgggcctggggtgtccccacgggagccctgacactgggtcctacatcctctgagtttcagcagctggccaaagcagggtccctggctgggcggcagacccagggtcccaccctccttccctgtctgcccccacctgacccacctgcccctcggctgggtctgatgggtccaagtccttggcctttgcctgggaagggggttgggctgtggtctgattgttttgctatcagagccaggcccagcccagcccttcgatcctggcctccagccttgggaactacctgcctggcactgcagtccgaggttccaacagaatgcgctgccccttgccctcagaggccgcggttgggagacacctggagggctcgagtcctccctttccctgctcctgctgggctgggctctgcagggactcagactcggcctctggaggttagttctggcagaggtgagattgcagagaactccaaaggccatttaggcagagaattgcaccccagcttcctccactatctcatcagctcatcctcggctcattcattccacctgctcatccccccagaactttctggcatcacctcctcctcctctgggcaccccccacagtgcctgtgcttccccctttctgcagagatcagtttcccgggagctccctgaagacaacactaggtctaattcatctgtgtgtttcatctctgcttgtctagacattgacatttactgagagctctttactttgtattaaaacaattttttgtttgtttggttggtgttttgttttgtttcattgagacagagttttgctattgtcgcccaggctggagtgcaatggcgtgatctcggctcactgcaacctccacctcctgggttcaagtgattctcctgcctcagcctccagagtagctgggattaaaagcgcccactatcagccaggcacagtggctcacgcctgtaatcccagcactttgagaggccaaggcgggtggatcacaaggtcaagagatcaagaccatcctggccaacatggtgaaaccccgtctctactaaaaatacaaaaattagctggtcgtggtggcgggcgcctgtaatcccagctactcgggaggctgaggcaggagaatcgcttgaacccgggaggcagaggttgcagtgagctgaaattgagccactgcactccagcctgggtgacagagtgagactctggaaaaaaaaaaaaaaaaggcgcccaccaccatgcctggctaatttttgttttttgttttgttttgttttgagacggtgtctcactctgtcgcccaggctggagtgcagtggcgcgatctcggctcactgcaagctctgcctcccgggttcacgccattctcctgcctcagcctcccgagtagctgggactccaggcgcccaccaccacacccggctaatttttatatttttagtagagacggggtttcaccgtgttagccaggatggtctcaatctcctgacctcgtgatccgcccaccttggcctcccaaagtgctgggattaaaggcatgagccaccgcgcccggcctaatttttatattttttagtagagacggggtttcaccatattggccaggctagtctcaaactcctgacctcaggtgatccacccacctcagcctcccaaagtgctgggtttacaggcatgagccactgtgctgagctgccaatcagctcatttttaggagggaagaacttggctggggaggggtggtgttggcccctcctcacagtgcacctgcactccgagtcacccttttccccagagcaggagtagaggtggccttggtccgttcatttgctggttccacacccttcccagccgggacccaagggtcctctccaacctctggctgtcccaatatccagggataaggggtgagccaggaggctttttctttcctaaggctgttcctcagcctctgccgggcctggaagggttgtggtatgagcagacaggtatgcagacaggtgcccttgcctgtggctggccctgccaagttaacatgcaagggtgcgagtatctgggcggctgtgtggttgcaggtgtctttgaggactgctgcctggcctaccactaccccattgggtgggctgtgctccggcgcgcctggacttaccggatccaggaggtgagcgggagctgcaatctgcctgctgcgatgtgagtggggccgtgggggctgggggggtggggtgcacacacagccttgctgccagcctacaccctaacctgggcacccccctctgctcaccacagattctacctccccaagagacacaggaaggtgtgtgggaaccccaaaagcagggaggtgcagagagccatgaagctcctggatgctcgaaataaggtttttgcaaagctccaccacaacacgcagaccttccaaggtgggcaagacctctgctgggcatctagggggcctgccctccctgcctgcaagcccatgtgtggttcagaccccgagggagggaattggagaccagaatactgacacctgcctgaaccccaaacaaagccagttgctggtgagtggggcaccaagtgaatgaccaactgattgagtcattgtccagtttttgtttctggagatggggtcttgctctgttgcccaggctggagtgcagtagcatgatcatagctcactgcggcctcaaacttgtgggttcaagcaatcctcccacttcagattccccaagtagctgggattacaagtgtgtgccaccagtccagctcttttattattattttgagacagagtcttactgtgtcacccacgctggagtgcaatggcgccatcacagctcactgaagccttgacctcccaggctcaagcaatcctcctacctcagcctcctgagtagctgggactacaggcatgctccactaatccagctcattgttattttattttttatttttattttttgagatggagtcttgctgtgtcatccaggctggagtgcagtggcacgatctcggctcactgcaacctctgcctcctgaattcaagcgattctcccgcctcagccccctaagtagcaggagcacaggcccacgccaccacgcctggctaatttttgtatttttagtagagacggggtttcaccatgttggccaggctggtctcgaactcctgacctcagatgatctgcccgccttggcctcccaaagcactgggattataggcatgaaccaccatgcctggctccagctcattattattattattattttgagacagggttttactcttgtcacccaggctggagtgcagtggcacaatcacatctcactgcagccttgtgttcctgggctcaagcaatcctcccacgtcagcctcccaagtagctgggattacaggcacacaccaccatgcctgggtaattttttattttcattttgcagagacaggttgtgccatgttgcccaggctggacttgaacccctggactcaagcaatccacctgccttggcctcccaaagtgctgggactacaggcatgagccactgcacccagccagtccagctcttttaatcaggacactttccactggtacagatggaaagctcaagcacatgggagactcattggcttaaataaccagtcaacagcttcaggctcagctggatccaggagctcaaaggatgatggcagagctcttgcttatttctctctccatttctccagcaggccctcatgctgtaaagaagttgagttctggaaactccaagttatcatcgtccaagtttagcaatcccatcagcagcagtaagaggaatgtctccctcctgatatcagctaattcaggtaaggactcttggtcatgtgactgtctcccatccatcacctttgctgagggttgagggctcgtgattggctcacactgggacaggagattcacctccaggacccaggagaggtggttgtgcggtcagtgccgcagattcacaggggagggtcctcggtggctgtccactgctgtgactcagcgcaaagacaccacagcaagtgagaaagtaaagccccaggggagtggcccaagagctccagggccccccaaagccagcaattctccagcagggaccgggtggttgtcctgtaattctactgaattctgacattgtgtgtgtgtgtctctctctatatatacatataaaatatatataagtaaatatataatatataaacatatataatatataagtaaatatataatatataaatatatataatatatataagtaaatatataatatataaatatatataatatataagtaaatatataatatataaatatatataatatataagtaaatatataatatataaatatatataatatatataagtaaatatataatatataaatatataatatatataagtaaatatattatatataatatataaataatatataatatataaatacatataatatataaaaataatatataatatataaatatataatatataaataatatataatataaagtatatataatgtataaataatatataatatataaatatatatatttattattatttttttttgagatggagtctcactctgttgcccaggctggagtgcagtggcgcgatcttggctcactgcaagctccaccttccgggttcacgccattctcctgcctcagcctcccgagtagctgggactacaggcgcccgccaccacgctgggctaattttttgtatttttagtagagacggggtttcaccatgttagccaggatggtctcgatctcctgacttcgtgacccacccgccttggcctcccaaagtgctaagattacaggcgtgagccaccgcgcccagcctaaatatataaatatataatataaatatataaatatataatataaatatataaatatataatataaatatatgtaatatataaacatatatgtaatatataaatatatataatatataatatatataatatatataatgtatatatttatatataatatataaatatatataaatatatattatataatatataatatatataatatataatatatataatatataaatatatatattatatataattaatatttttttatggcagggtctcactctgttgctgaggctggagtgcagtggtgccatctcggctcactgcaacctccgcctccagggttcaggcgattcttgtgcctcagccacccaagtagctgggattacaggcatgcatcaccacgtctggctaattttcatatatttattagagatggggtttcgtcatgttgcttaggctggtctctaacttctggcctcaagcaattctcccacctcggccccccaaagtgctgggattgcaggcatgagccactgtgtccagctgacattgtctatctggaggtagtgacacaatccacaggttaaggactcagtcccacaagactgcccccatttcagatgctggttgcaagtagcaagttgtcactttatttctgactgattgtctgtaagtcagggcttccacctctggttggatcattcgatagaacagctcacaggactcatggaagcgctctacttgtgtttaccattttattgtaaaagattacaaaggggctgggcatggtggctcacgcctgtaatcctagcactttgagaggctgaggcagaaggatcaattgagcccaggatggccgggcgcggtggctcatgcctgtaatcccagcactttgggaggcggaggtgggtggatcacgaggtcaggagatcgagaccatccaggctaacatggtgaaaccccaactctactaaaaatacaaaaaattagccgggcgtggtggcaggcatctgtagtcccagttactctggaggctgaggcaggagaatggcatgaacctgggaggcgggccttgaagtaagccgagatcaagccactgcactccagcctgggcaaaagagcgagactctgtctctaaataaataaataaataataaaaaaattgagcccaggagtttgagaccagcctgggaaacatagcgggaccctgtctcaagaaaaaaaaaaacaaatttaaattagctagttgtggtggcatgcacctgtagtttcagctgcttgggaggctgaggtgagaggattacttgagcccaggaggtagaggttgcagtgagctatgatcataccattggaacttcagcctgggggacaaaatgagaccctgtctcgaaaaaagaataaaaagatattacaaaggatagggatgaataagccagatggaagagatgcttaggtaggcaaagactggaagggactcaagtgtagaagcttctgttcccgtggagttgcagtacaccacccctcccacacacggatatggtcacaagaccctgaaccccatagttcaggctttctttttttcagagatgaggtctcactctctccgccaggctggagtgcagtggcgcaattgtagctcactgcctaattgagcagctaggactacatagctcaccgcctcagcctcccgagtagctgggactgcaggccagtaccctcagcttaccagggatttttttttttttgagatggagtcttgctctgtcacccaggctggagtgcagtggcatgatctcggctcactgcaagctctgcctcccgggttcacgccattctcctggctcagcctctggagtagctgggactacaggcgcccgccaccacgcctggctaattttttgtatttttagtagagacggggtttcactgtgttagccaggatggtctcgatctcctgacttcatgatccaccagcctcagcctcccaaagtgctgggattacaggtgtgagccaccatgcccggcctaatttttttttttttttttttttgagacagagtctcactctgtcacccaggttggagtgcatggtgcaatcatagctcactgcaacctctgcctccagggtgggttcaggtgattctcctatctcagcctcctgagtagctgggatcataggcatgcaccaccactgccgactaatttttgtatttttagtagagatggggttttgccatgttgggcaggctggtcttgaactcctgacctcaagtgatctgcccacctcaactgtccaaagtgctgggattacaggcgtgagccaccacgcctggccttcaccagcaatttttttgtttatttgtttttatttttagtagagacggcgtttcactatgttggccaggctggtctcaaactcctgaccttgtgatccacctgccttggcctcccaaagttctgggatgacaggcgtgagccaccatgcccagccaaccagggaattttttagaagcttcatcacataggagtgaaggatgattaactccattgccaaccttcttccccttcctggagaatgggaccaaaagctccaagtttctaatcaatggcttggtcttgctggtgaccagcccccacccagaagccaaccaagagtcacctcattagaataaaatatgtccccattacccaggacactccaagggatccagagctctgtgtcagaaacagaattcaaagaccaaatattagcacaaaaggccaggtgcggtggctcacacctgtaatcccagcactttgggaggccgaggtgggcagatcacaaggtcaagagatcaagaccatcctggctaacacggtgaaaccctgtctctaaaatacaaaattagctactaaaaatacaaaatacaaaaatactaaaaatacaaaaatacaaaaaatacaaaaattagccgggcatggtggtactcgcctgtagttgcagctactagggaggctgaggcaggagaatcgcttgagtcctggaggcggaggttgcattgagccgagattgcgccactgcactccagtctggcgacagagcgagactgtctcaaaaaaaaaaaaaaaaaaaaaagttagcataaaagattctagcactcctattactcagaaattcacaagggttttaggagctgtagggactggaggtagagacaaatgcatatagttactattattttacagccgtcaattttacttcggcctctctcattgcttctgcaggactgtgagccggctcatttctgggctccatcggcacaggaggggccggatctttctccgataaaaccgtcgccctacagacccagctgtccccacgcctctgtcttttgggtcaagtcttaatccctgcacctgagttggtcctccctctgcacccccaccacctcctgcccgtctggcaactggaaagagggagttggcctgattttaagccttttgccgctccggggaccagcagcaatcctgggcagccagtggctcttgtagagaagacttaggatacctctctcactttctgtttcttgccgtccaccccgggccatgccagtgtgtccctctgggtccctccaaaactctggtcagttcaaggatgcccctcccaggctatgcttttctataacttttaaataaaccttggggggtgatggagtcattcctgcctgttacatttcttttttctttttttttcttgcctgttacatttcatgatgaggtgcaagttgctgctgccctgccctggggtgaagccaatgcgatctttgccaccccaagctctcctaacagacggctctccaggggccaagcattggtcactggttgcagaatgcacttcccagctggtgaccttaaaccaattgctgactctctgggtacctctcagcttgtctgtagaataagagtcactgtgcttgctctacttagattccagggctgtggtgagtccagccgatggacacagaagccctctgcaagctcttataggctgcctggaggccactggtaagccaggaccagaccagggacagagctctggtaccaggcgctagtgacaattctgcaggtggaggcctgagtcaccacccgatgatgctgtcttcagtccttggcaacctcagtttccatcacaacagagaatgatctggatgaaaaccaatgcacattgggccgggcaccgtggctcactctgtcatcccagcactttgggagaccaaggcgggtggatcacctgaagtcaggagttcaaggccagcctggtcaatatggtgaaaccccatctctactaaaaatgcaaaaattagtcgggcgtggtggcaggcacctgtcatcccagctactcgggaggctgaggcaggagaattgtttgaacccgggaagcagaggttgcagtgagccgagatcacgccactgcactccagcctgggtgacagagtgagagtttgtctcaaaaaaaagaaagaaagaaagaaagaaaaccaagcacatcatctcttaggggacaccctggtggtttgggatcagggaccgggatgaagttgcagaagaaacggagtcacgttcagtgttcgggctctaccgcgcactatgtgggtgacccggacaggttccacaagctctctaagcctcaattttgcccccctggaaaatgggggtgataatactgcctgcctcatagcgctttgttggagaccaaagacactgtgatgtgtgacacgcacagcacacagtacatgctaactgtgtgtttattaacacaatgagtaccctggccatcgaattggagtccgcctggaaccatgcatggtggtgtgggggctgatggcctgggaacatgcccacctttttttttttttttttttgagagagtcttgctgtgtcgcccaggctggagtgcaatggcacgatctccgctcactgcaacctccgcttcccgggttcaagtgattctcctgcctcagcctcctgagtaactgggattacaggcacgtaccaccacccctggctaattttggtatttttagtagagatggggtttcaccaagttggccaggctggtcttgaactcctgacttcaagtgatccagcctccttggcctctcaaagcactgaggttataggcgtgagccactgcacctggctgcccaacttcctcccctcccctcccctcctctttttttttttttttttttggtggagtcttgctctgttgcccaggctggagtgcagtggcatgatctcagctcactgcaacctctacctcctaggttcaagcgattctcctgcttcactctcctgagtagctgggattacaggcgcccacgaccacgcctggctttttttttttttttttttttgtattttcagtacagatggggtttcgccatgttggccgggctggtctcaaactcctgacctcaggtgatctgctcacctcagcctcccaaagtgctgggattacaggtgtgagccaccacaccccgccaggccacccaactttcaacctggcctgaccttggccaaagtgtttaacttctctgagcctcagttttccctgtaaaatggggatggtaatagcatctattccgtgaggttgtagtgacaatcaaagtggtcaataatggtaaaatacttggatactaacacctgtaattccagcactttgggaggccaaggcagtaagaccacttgagcccaggagctcaagatcagcctgggcagtatagggacatccccatctctaagaaaaataaatgttaggccaggtgtggtagctcatgcctgtaatcccggcactttgggaggccgaagcgggccgatcacctgaggtcaggagtttgagaccagcctggacaacatggtgaaaccccgtctctactaaaaatacacaaattagccaggtatggtggcacacatctgtagtcccagctactcgagaggctgaggcacgagaatcacttgaactcgggaggcagaggttgcagtgatccaagacagcgccactgcagtccagcctgggtgacagggtgagactctgtctcaaaaagaaagagaaagaaaaagaaatttaaaaaaattagctgggtgtggtggcgtgcacctttggtcccagctacttgggagaggctgaggtgggaggattgctcgagcccggaaagtggcgaccacagggagccacgatcgcgccactgcactccaacctaggcaacagagcaagaccctgcctcagaaaaaataaaaaaaaaatcgaatggtgtctggtatgtagtacgtggtcaggaagcgtgagccattattaccattctggggagcccataaggccttctgcttccccaggcacaagatctgcctcgcccagtccaagggcagcatctacttacttcaagaacttgccaaagggcaggcagacttaacccaaaataactttattatcgtctccacttttgatataaaagcattctccaaatggggggcaaatgtggcaagtcactgtggagtctgggccccctgtacacccttctactccgaggaataagccctgtgcccaccccagttgcccattgccatgtcctgccaaccccctgccccccgccagggcaagccacagtgcagtacagaagtgaaagcctgagattggccagacacggtgaccacagggcctcttcctgaccttggctgtgggggcagggggattgcacattgcagcttcttgctgtctccaggaaagactgagtaactggggggcccccggggctggcacagaggcccaggcagaggccgggcttgcctgaggttgtcgtgtagcatttcactcttcctgagtttcggggttcaatctggtcagccatcgcttctggggatcagtccttcccagttccagaatcccccttctctggacagctggggcccactgaggctcctcccaactaaagcaactgcagctgcaccttcagcctcaaggcctggccccatggccctggctgcccctctggctggacaccccagggtcctgccatgtggctcaccacctccagccggtaggttccaggccccggccgcctccgccccagctgcagggagctgacgccacggaggtgatgcatgcgaaagaaaccttgctcgtttccgcggacgatgacgtagcggatccggccctctagaccctccagggccggccggagctccaggatgcgctcggcccggcccaggtgtgagaggttcaggcccaaggtcagcagggcctcggagtcaagggtggccaggttcacctgggaagaaaggccaggtgtgtggtcagagcccaggagaatcgggatgtggtgtgggtagggggtcctcggattgtggccaaagaggagattctggccaatctctaaagtgaaggaaagagccataaaaaggaatgaaatcatgccatttgcagcaacgtggatgcagctggaggtcattatcctaagctaattaatgcagaaacagaagaccaaatacggcatgttctcagttataagtgggagctaaaaattgcatacccatggacataaagatgggaagcacagacactaggactactagagcagggagagagggagggagacaagagttgggaggccgggcgcagtggctcacgcctgtaatcccagcactttgggaggccgaggcgggtggatcacaaggtcaggagttcgagaccatcctgaccaatatggtgaaacccagtcgctactaaaaatacaaaaattagctgggcgtggtggcgggcgcctgtagtcccagctacttgggaggctgaggcaggagaatcgcttgaacccgggaggtggaggttgcagtgagctgagatcacgctactgcactccagcctgggcaacagaggaagactgtctcaaaacaaataaataaataaataaaaggaaaactacctattgggaactatgttcactgtttggatgatgggatcagcagaagcccaaactgcctcatcatgcaatatatccatttattaataacaaacctgtaccctctcaatctaaaaaaataggatgggcacaggggctcatgcctataatcccagcacttttggaggctgtggcaggaggattgcttgaggacaggatttctttgtttcttcttctttttcttttttttttttttttgagatggagtcttgctgtcgcccaggctggagtgcagtgacacgatctcggctcactgcaacctctgcctcctgggttcaagtgattatcctgcctcagcctcccaagtagctggaattacaggtgcctgccatcatgcctggctaatttttgtattttcagtagagacagggtttcactatgttggccaggctggtctcaaactcctggcctcaagtgatccgctcacctcagcctcccaaagtgctgggattacaggcgtgagccattgtgcctggccaaggccaggattttgaggtcagcatgggcaacatagtgagacctcatccacccacaagaagtgaaaatattagtactggtgtgcacctgtagtcccagctacttaggaggctgatgtgggaggtcccaggagttcgaagcagcagtgagctgtgatcacacctctgcactccagcctgggtaacagactgagaccctgtctcaaaaatatatatatgtttattaggcacctactgaattcctggcaatctttgaggcactggggatttagcaatgagcagataaaaatccttcccctcagggagtttaccttctagtaaagcaaagcagatagtagacaaataaatggaaaatgtaaaagtgacaagatgtgctacgaaaagacatgaagttggctgagggccaaggtggacagattgcttgagcccaggagttcgagaccagcctgagtaacctggtgaaactctgtctctactaaaaatacaagaaattaaccaggtgtggtgttgcacacctgtagtcccagctactagggaggctgaggtgggaggatcccttgagcctgggagttcaagctgcagtgagctatgattgcactgctgcattctagcctgggtgacagagtgagaccctgctccccaaaaaaaagaaaataaattgattttaaaaatcaataaataggctgggcgcagtggctcacacctgtaatcccagcactttgggaggctcaggcaggtggatcacgaggtcaggagattgagaccatcctggctaacaaggtgaaaccccatctctactaaaaatacaaaaaaaaaaattagctaggcgtagtgtcaggtgcctgtagtcccagctactccagaggctgagccaggagaatggcatgaacccaggaggcggagcttgcagtgagtggagatcacgctgctgcactccagcctgggcgacagagcaagactccgtctcaaaaaaaaaaaaaatcaataaatagggtgggcacggtggctcatgcctgtactcccagcactttgggaagctgaagtgggtggatcacttgagcccaggagtttgagaccagcctgggcaacatggtgaaccccgtctctacaaaaaatacaaaaattagctgggcaggtgtggtggtacatgtacctgtggtctcagctacttgggggattgaggcgggaggattgcttgagcccaggagttcaaggctgcagtgagctatgattgcgccactgcattccagcctgggtgacagagtgagaccttgtctcaaataaataaataaataaataaataataaatcaataaaaaaataaagtggaggaaaatactgcttcccttggcatctcaagtctggttgttcatccgcaaggtcagctggatctgtagactcagtggcataaggctgaggctgcttctgagagaggcagggaaacggccactgttacacactacagacccctagtcccagctgagggaccttgctcagacccctgccagcctgggccaaaggtatcaaagatttgctctcagagacccagcagccaggggattattcagatgacattgcgacccagagccctaaggtcactcagaaatgtcttgggatggctggtgttaggaacaagggcctttcagcagaagccagcccctaaaagaatgccagagctgacagtgagagaaacgggatgccaagcagggctggagaggagagcgtaaaggaccagacagaagagccgcctgatagcttccgctgtgcttcctgcatctggccctctttgagagccccttgtgtgccaatgacaaacccttctttatttaagctcctctgaagtgccttcctggtcttggcagctggacagggccctgaataagacagcgagcctcaatggcaggctaccccagggctgggtgacgtatccaaccccacagaaagtcatctgtgttttctttgcctttgttttagggagcactgtgttggtttggcctcatttacatgccgacggagtgttttgctgttgcattcaagtgaaagttattcctgttccccagcccctcagttctggagatctcaggccttcttcccacggaatgttgttaagacttatgctcttactgacccctgctggcagtcagtgggtattgcaggcaaaggcacaatacagccctatttttgagacagggtctgtctgtcacccaggctggagtgcagaggtgtgatcacagctctctgccgctttgaactcctgggttcaagcaatcctcccgcctcagcctcccaagtagctgggactacaggcacatggcaccacagctggctaatatttttactttttgtaggtggagggggtctcactatgttacccgggctggtctcaaaatcctggccttgactgggcacagtggcacacacctgtaatcccagcactctgggagtctgaggtgggctgatcacttgaggccaggagtttgagaccagcctggccaacatggcgaaaccccatctctactaaaaatacaaaaattagcccttctctgtcttgatctacttctgccctgggaccctgacaaccactcactcactcttattgagtaccaaggggtaccaatacagtagtaaatcctacagacacagctctacccttatgaagtttacagaaaatatcagtaactatgggataatatatacatccacagtttttcctagcaagggggaaaaaataactagaggggaaaaagggcctttcagtaatacaaagtaatacactcacattttatctaatatagaaagcctctcaagcccaataaccctatcccatgtctcactttgtttttccccatagcacttatcatgtatcatatttgtcatgtgttataaaagatgatatgttttacatgttgatttcttgtgtgtctcccttttagaatatcagcctcacgagggcaggtgtttttgttgttgttgttgttcactgttgctccattacagtgcccagcagtggtattcagtaaaatctgtggagtgaagaagcttcgacctaaatgtctgcagtgggggtgagtttggggtaatggtttccatgctcagtgataattgtttgggaaacaatgtaaagtgatggcttcggaagacagaggggcccaggatggctggccatggatgccaaggctgcttgtaaagagaagtccacgtgccatatccatggaatctctgaaccaccacgttcaagttctgtaacttgggcatgtgccctaacctctcagagcctcagttcctccatctgtaaaatagggataatagtggcatctaggctgggtgcagtgcttcatgcctgtaatcccagcactttgggaggccgagccgggtggatcacctgaggtcaggagttcaagaccagcctgaccaacatgaagaaaccccgtctctactaaaaatacagaattagctgggcgtggtggtgcacgcctgtaatcccagctactcgggcggctgaggcaggagaatcgcctgaacccaagaggcagagattgcggtcagccgagatcacgccattgcattccagcctgggcaacaagagtgagactctgtctcaaaaaaaaaaaaaaaaaatagtggcatctacacctcccagggttgtcataaacattgagaggctgtgaacagagagcacttggagtgatacctgcatacagcaggtgtttaatacatttttggctttcagatcccttgggtgatggctgcaggactgacccatagtcagggactcttcagttgaggggcaagcagctggcatctgtggcaaaaatgccctctctgcacaccttgatggggtggcccgagagggaaggagggatggagccataggcctgccctacggctactgagtggtgtgttgaagatccctgagattcctagagacaaggcaggttcaggaactccaggagcacctcaggcacaagaggggtacagggcagatgctgagtgggtatgtcaggttggggccctggggctcctaaggggagcctctgctggggtccccagagaaaagactcacctccccaaggctcagacagggaaggggcttgggcttaacttggcctaagggtttgtgagaacagcccagagggatgcacagaagagttgagatgggcagagctgtggtacaaaggccacttagggccccattggaactaaatcccaaaaggtcccaagggaggccttcaccaaccaggaggtgagggggtgacagattccagggtgcaggcagggttggaggggcccaggtatttccctgcatccaagtgcctttataaaagggacccatagaaagcatcacagcccggccagggtctgtatggaagacgcctgacttgtcaccaggagtgaggcagagtgtccgggagatgtgtcccccagagaccccccccaagaaaaatcccagggctgagaaagcacaagaaggccctaagccggcaccatgacatggggaacctgttgggatctggagcctggtgctccttcttgggggggctgacatgactaagtcgggtccacagcctctttcccacactcacccattccctggccacccctgcctagtgcagcacccatgtcacctggtggtccctgtgggcactgcgtcgtggccggtcccgaggggagaggccattgatcttgcattcgtagcaggcttcagacgagagcagctcctctttgtccggggtgtcctggggtccggggctgaagcccaggccggagacacagtgcctgggccaggatgggcagggtggaggggtttcagaggcgggctgatgggacctccccagccacgccgctccaccccatactccgttctgagtcatgctgcaaatgcccacgcacacaaatgcctctgagcatgtgctggtgtggctccgtgtgcacgagtgtgtgtgcaccacataagggtgtgcatgtgtgtcccttggttcatttgggcataggtgtgaacacaggagtgagaggacgtgcacaggctgggatggatgaatggacatgagcatacccaggggcatgtgcgtgtgccaacctgtgtgttcacatggggaataactcatgcaggcacatgtgtgctcgtaggaatgtgtgaatctccctgagtgtgcctggggatgtgtgtatagtgtgagcactcacagatggctgacgcgtgcttcctcacctgtgcaaaccaggatgtagcaatggcactgtgcccccagggatgtgggcatgcatgagcctgagtgcacactgggacatgcgcgcgtgcacacacacacacacacacacacgtgtgcatgctgggatctgtaaatgcacaagggtgcccacgcatgctggtacgggtgtgtgccatgtggacaactacatgtgagtgctgtgaggatgtgtgtgaatagatacaggtgccactgtacctctgcgtgtccaggactctgtgcatatgtgggcaaatgcctgcatgcacaggctgaaggagctcttctggtaaattcttggcatgcacaaagccccgtgtgtgtgtgtgtgtgtgtgtgtgtgtgtgtgtgtgcgtgcgtgcatggacgcttgcggggcatggagtctgcttgccccactccagcctctcacccttgcccagcccggaagtagccttgaggacagccgcacaggaagccaccaggcgtgttggcacagctgtagctacaggggccacgccgtccggcgcactcatccacctcctggcagcccccgagggcctgatcaaagtcaaagccagaggggcagacgcagcggaagccaccaagagtgttgcgacaggaggcgctcccgcaggtggggggcgacagggcacactcattctcatctgtgggaggaaaggaggaggagagggaggacgcagaggtggggcagtgcagccttcacacccccagagccctccacctggaatgctgtatgttcagagcccaagtccaatgccaaactcttcagcaagctggcagtgagccctgagactagatcggccccatagccccgctgccccaaaccctgtggttctccttcacaacatctctcaacacttcccctaaaccccaaaatgtgggatgatctagaacaagctttctcaccctcagtgctattgacacttggggccagatcattctctagggaggaggcctccttgcactgtgggacattgaacagcatccctggcttccacccgcttgacaccaggaaaacctatccgcctccaattgtctgtttggagttgggagtctcactctgttgcccaggctggagtgcagtggtgcaaccatagtgcactgcagccttgacgtcctgggctcaagggatcctcctgcctcagcctcctgagtagctgggactacaggtgtgcaccaacatgcctggctaatcttttaactttttgtagagatggggggtcttgctatgttgcctaggctggtcttgaactcctggcctcaaatgatccccctacctcaatatcccacaagagtgaactaccatggcggatcccaattgtgatgatcaaaaatgtctcgcagacacttcaaaatgtactatgggggtaaaatggtcctctgttgagaacctagttaggggtctaattaatctctgtttcctttgctggactgaaaaactcaaggcagaaatggtttttcagctcacttctgcatctgagctcagggcctagtgaaaggcaggtccttggcaaacagttggggaaagaatgaatgagtcagtacggggggaggaaacaagttgaggaagagttgccagcaaaggccaatggtctgtgggatccccaagatccccaggggacaagcagcttgcctggggggtggggtcgtgtggtgtgggaagcccaagaagaacttagctaaagacccaccatgacagacaaaaggagggggcagagaaggcagtgcctgtgaggcagtgggagagcagggatagccacatcacaaaggccacaggagagagtgtccaggagcctgaaggggcagactgtggtgcccagagcagtggaggtagaggatggaggccgaggagaggtctcaggagagagcaagtgggcctgaaaatggtagagggtgaaagctgcactgcagtggaggaatgaaaagagcagtgaaagaggctgctaggaggtcctagagcagccagaagatgggggaaggttggggggcagaaggctagccccccaaatggagggcctctgcaacagctatggcaatgacatagcatgcacacctccattgccccttgcagcatccatagcagacatcactaatcacactcgtggcagacatcactaatcaatcacagcactctttccctgtgatcacaaaattgcagacttcaggtctcagaatctttctcaactgagtcctccaggccaccatgccctaaggaatgaactcagacactttttgatgcttattctgctgcaccttgactccccagcagtggggaactcactaccttctgggctggcctgttcaatctttagataattgtgcttgtcacatcatcttgcagggtggcgtctgttagtcgcctgctctgagcagattctggtggagggcccagcttcttcccagcccttttcactcacccacacactgggcccactgggagtgctgggtgaaaccctgggggcagctgcagcggtagccccctagctggttctgacagccatgctggcagcggtggggcccatcacattcattcacatctgagacatagagagagggagagagggtttaccagacggctctcaggaccaacacccccaaacactagaccccagccaaagctgggctgtaccttcacagccatggcctgagctgaccagggtgaagccttggtggcattcacagcggaagctgcccggggtgttgtggcagtgcccgtgggcaccacatgggccaggctgggctgagcactcatcattgtctgcagaggagagagatcaggcagggttgcctgctggttaaggaactcgtgtcaggtgacacaatgccagtcccaccactgtgtggcttcaggcaagttgctcaccctctctgtgcctgtttcccactctgtgaaatgagatctgtaacagttcctgactcagaataggcaccaatgtttgagatcctgcacataaagaatctcatctccaccgcctcgaagctgtgtgtccttgggcaacttacctaccctctctgtgcctcgatgtcctcagctgtatatggagatgataatgtctacctcattgcatttttgtgtgcatgcgagaattaaattaacctaatcatgtaaaaggcttagggcagtgcccggtaaaagagtaaaagataaacaaagcctcttttccttctcccatggaaaaatgacatagggttgcctgttgagttttgttcccatggaaacctgacaatagtgtgaggtcagccggtgccatggattgaatgttcgtgtctctccaaaatcctatgttgaagccctaacccccagtgggctggtatttggatattaggtctttgggaggtgatcagggttagataaggtcatgagggtagggcttttatgatgagaatagtgcccttataagagacaccagaaagcttgctctgtctctgccaagtgaggacacagcaaaaaggtggctgtctgcaaaccaagaagagagccctcacagaaccagccgtgctgccaccttgatcttgaactgcccagcttccagaatggaaaaaaaaataaatctctgtagtttaagccaaccagtgtatgggttgtccgtgtgcgtgtgtgtgtgtgtgtgtgtgtgtgtgtgtgtaagctattgttttaaactgaatagtctgtgatcatctttctatgtctttaaatattcttactattcttgggggctgggtacagtggctcatgcctgtaatcccagtgctttgggaggcctagggagcctccggatcacctgaagtcaggagttcgagatcagcctgaccaacatggtgaagccccatctctactaaaaatacaaaacaatttagccaggtgtggtggtacacgcctgtagtcccagctactcgggaggctgaggcagaagaatcgcttgaacccgggaggcggaggttgcgatgagccaagattgttccactgcactccagtctgggtgactgacagagtgagattccatcttaaaaatatatgtatacatacacatatatatatatttttcttactattcttatttgcataattttaaatggccaccacatcttcacttggtgtggatttgctctgcttcatttaaccaactgttaattttggtttttttagataggatctcattctgtcccctgggctggagtgaagtggcacagtctcagctcactgcaacctccgcctcctgggctcaggtgagcctcctacctcagcctcctgggtagctgggactacaggtgcacaagaccatgcctggctaatttttgtatttttagtggggactacgttgtccactatgttgcccaggctggtcgcaaactcctgggcacaagagatcctcccaactcagcctcccaaagtgctgggattacaggtgcaaaccactgcgcccggcccagtttttggatttgaatttgctaaatcccacacttgcagtctatggtattttgttatggcagcctgagctggctaaaatggccaggttgctacgatggtaggagggcattggtacaatggccagagagcattgctacaatggtgggagcccatggctggtatactgcatttgaactgggattttgaggaatgaacaacaaattcctggtggaaaatcctgcttttagcttccttgagtacagagattcttgacactaagcacatatctatggagatgtagagtctctcttggggtcgggcacagtggcttatgcctgtaatcccagcactttgggaggccgaggcgggcagatcacctgagcatgggagtttgagaccagcctgaccagcatagtgaaaccccatctctactaaaaatacaaaaattagctggatgtggtgctgcatgcctgtaatcccagctacttgggaggctgaggtgggagaatcgtttgaacccaggaggcagaggatgcagtgagccacgatcacgcccctgcgctccagcctgggcgacagagtgagactctgtctcaaaaaacaaaaacgagcaaacaaaaagtgaatatctcttgggaacaacagacatgggaacatgaagcttctaagtaggagtggcccctgcggctgcctgagctgtcacttgaggggccacagagaatagctctagactctggccagaagaaatgtctggcacagccaggcaccgtggcctgcaatcccagcactttggaaggccgagatgggcagattgcttgagcccaggagtttaagaccagcccgggcaacatggcaaaaccccgtctctacaaaaaatacaaaaattagccgggcgtggtggcacacacctgtagtcctagctacttgggaagctgaggcaggaggatcgcttgaacctgggaggtgagattgcagtgagctgagattgcaccactgcaatctccagcctgggcgacagagcaagactccatctcaaaaattaaaaacagaaatgtctgccaccacccacaatttctttcccttacatctagcaaagcaaaccaagtgtcaggctggcctactgtggccatgtgagtttgctcttctattaacagtttagtcattagcagacaggaacaccctgagacaaaatccaagccactgtctgttgtatcaataaagtttattgggacacagacacggtctttcatttacgtatctctccagctgctttgatgctagcatggtagagtccaatcgtggcgacagagaccatctcaactacaaagctgaaaatatttactcctcttgagccctttgcagaaaaagtttgtgacttttgatcaagttgagcctcacaccaccatctgcctggctgagaatttaaactcatttctagtgagagaagcagtcacgtgtgaccttgctccacggatgttacccatgtgatgcacggccctggtccatgcagctgctcacacatccagtgaaaaccttactttttttttttttaatagagatggggtctcactgtgttgcccaggctggtctcaaactcctgagctgaagcaatcctcctgcctcagcctcccaaaatgctgggattacaggtgtgagccattatgcctggccacagactttaatgttgcagagaaacagaaatgcctcttgtttcaagagtctttgttcaaatgttctctctctctctcttttttttttttttgagtcttgctctgtcccctaggctggactgcagtggtatgaacactgctcactgcagcctcaacctcctgggttcaagagatcctcccacctcagcctcctaagtagctaagactacaggcaggtgtcaccacctctagctaattttgtattttttgtagagatggagtcttgccatgttgcctgggctggtctcgaactcctggccctaagccatcctcccaaagtgctgggattacaggcatgagccacagtgcccagccaaatgttctcttttggtgatacttgacctgatccctctcttaaaactgaagccctctcaggaggctgaggtgggaggatcacttgacaccaggagtttgaggcttcagtgtgctgtgatcacatttgtgaatagccactgtactccagcccgggcaacagagtcattaagagactccatctctaagaaacaaaaaacaaaacaaaaaacccagatgtggtgagcctgtagtcccaagtactagggaagctgaagtgggagaattgcttgagcccaggaatttgaagtttcagtgagctgcgatcacattgctgtattccagcctgggtgatggagcaagactccatctctaaaacaaacaaacaaacaaacagacagacaacataaccaaaaacaaccaccaccaaacctctccctaccctccaaaacaaccctgtggccctctccttctttcctgaactcctgcttttactttttctttctttcatgacacacatcacctttgaacacactattctgttaattgtttgtttgtttgtttgtttgttttcgagacagagtcttgctgtgtctgagtgcactggcacgatctcggctcactgcaatctccacctcccaggttcaagtgattctcttgcctcagcctcccaagtagttgggattacaggcgccaccaccacacccggctaatttttgtatttttagtagaaacggggttttgtcatgttggccaggctggtctcgaattcctggcctcaagtgatctgccagcctcagcctcccaaagtgatgggattacaggcatgagctaccacacccaaccacaccattctgttaatttcttgttatgtctgcctctagtcttgattctgtgctagaaggaaagttccatgatggaagatccctgccttttatgtttgttgctgtacccccagggtctataacagggcccgacaaaccatttctgtttctgtaacaggctctgtcccaagactcttctctgccaatatagtgcaaaagcagccacaggtgattgtaagcaagcgggcttggctgtgtgtcaatcaaactttattaacaaaagcaagcagggggccgggcttggctggcagcctggagtttgccaccctttggtctagagcactgcctggtacacagtaggtgctgtctgggcagattagtgggcgcgtgaaaggggccacccttgactaggctctgcctttggggaagattgtgttccctgggggccacgagacactaagaaacaatgatggtagcagatgcccttgtggctttagctgttgaactgatttcctcctgggactatgtgagacctgggatttcaggagcgctctggggaggctctgggagggagatccagcagggacttgtcagggggaaggcaagatgccataagccaaggcgagagggcctctctcctcccaaaggagaggaaggaggttctagatgcctccaggaagcgagcactaaggaagtaacgactttgttctgatcacccccatgtccccaatgtccaatacacaccgggtgcttgatactattttttttgagacagagtttcgctcttgttgcccaggctggagtgcagtggcatgatctcagctcactgcaacctctgcctcccgagttcaagcgattctcctgcctcagcttctcggagttgctgggattacaggcacctgccaccatgccaggctaatttttttgtatttttagtagagacgggttttcaccatgttggccaggctggtcttgaactcctgacctcagatgatccacccgcttcagctttccaaagtgctgggattacaggcgtgagccattgcgcctggccaacttgatatttttttggtgagcaaaataactaatgctggggtcatgggtcacctcccggtgaggggcaagggtcactcaccgaagcaggcctggtggtgctgggtgaagccgggcggacagcggcaggtgaaggcgcccacagtgttgacacagaggaactgacagttgtgctgccgggaggtgcattcgtccaggtctgcagcacggatggtccagcaggctcagggcagggcccagtgggggattaggggcttcccaggggctgcccttgccacctccaggcagaggggtgacaagagaaagacctcggagatggtgcttgactccatgcagatgggagggggtgagattgcaggggacatgtcttgggcatccctttggggccctagactgcatgcagtggtgggagtgggggagagttgaaaggacatcacctttgcaggtcctgccatcctcctccagcaggtagcctcggggacagctgcacaggaaactgcccttcgtgtttttgcagaggaaggtacatggcttggggacctggctgcactcatccatatctggggaaggacagcgtgggtagtggggcggggttagacagacattccctgggggtgttcagggactgaggtctccaccagaccccgaccatctgaaatctgtggacttacacaggaatgaacacttctttctgcaaaaagccaggtgggaaatacatttggttttgcaggccacaccatctcagatacaactactccatgtggcctttgtactagcaaagcagccattgagggtaagcagacaaatgtgcatggctgtgtgctaataaaactttattgacaagaacaaatggagggccagacttgaccctcgggctagagttttcttcccgctgacttagatgtacgcttgctacaaaacacaactgaaaaatatcaggatgtgcaaaataaaaggaagaaataacagcaggaaagtggcccaaacagggtgggggtgggagaacgaaaggatcctccctccctccctccctcccttccttgtttctctctttctttcttgagacggagtctcgtttcatcacccaggctggaatgcgatggcgcaatctcagctcactgcaccctccgcctcccaggttcaaacaattctcctgcctcagcctcccaagcagctgggattacaggcacataacacctggctaattttttttctttttttcttttttttagtagagacggtttcatgatgttggccaggctggtctcaaactcctggcctcaagtgatccttctgcctcagcctcccaaagtgtgctgggattacaggcgtgagccacctcacttggccttccttcccttccttcctctccctttctctctttctccctttctctttctttctttctgtttctttctctttctttttgtctctctctctttcttttttctttctttctcttctttcttctcttttttctctttctcccctttctctttgtttctttctctctctctctcttccttccttcccttcccttccttccttccttccttccttccttccttccctttctttctctctttctttcttgacagagtctcactctgttgtccagactaaactgcagtggcatgatctcagctcactacaacctccacttcctgggttcaaacgattctcctgcctcagcctcccgcgtagctgggattataggcatgcaccagcacgtgcagctaattttcgtatttttagcagagatggggtttcaccatcttggccaggctggtcttgaaatcctggcttcaaatgatgtgcccaccttggcctcccaaagtgctgggattacaagcatgagctactatgcctggcctgtttttttttttctttctttcttttcttttgtttttcattttttaagagacagggtctcactctgtcacccaggctggactgcagtggcacaatcagctcactgcagcctcagactcctgagctcaagcagcctcccaagtagctggggctacaggcgcatgtgggactacaggccaccatcctggctaattttttttagcgatggggtcttgctatgttgctatggaactcctggtctcaagtgatcctcccacctcgacctcccaaaatactgggattacagtagcgagccatcacacctggccctcagttgtctgtatggtttgggcaccactttgtaaatgaaagcctaacattgcaaagtggaaagtctcagggaagttgagttcaggggctgcacagaaggtggccaggctgggccaagggtgcaggtgcagagggctgggctcacccaggcaggtagtagcagtagcatccggtgtgtacccggcctgacagtggcagcggaaggagccaaggctgttgatgcactccccatgagcacacaggtgagcaagcatacggcattcatctacatctgggaaaaagtagggtgcaaatggggctggctggctgcttcgcgcctccaccgaggaatgtctccttctctctgcccagcagccgtctcctcggaggaaagtccagcctcccttccacaccggccactgcaccccagcccacgtggaccccatcctcaggctgcggatgacacctgagcccgcaggacacgcccatgaagcttccagggaaggggactcacacccacccctccccagcctcaacagcgacacctcctcagtgcaccaacatgcagaacagagacacacagtgcatgcaacatgatacactagccacacacctagatgctcctgcagaaacacgggaacacacgccaacactcagggactcccgagtctccccccagccacacccccaaaaagccatttcctccccagtcctactattttttctttttttttttttttgagacagagtctcgctctgtcgcccaggctggagtgcagtgacacgatctctgctcactgcaagctccgcctcccgggttcacgccattctcctgcctcagcctcccaagtagctgggactacaggcacctgccaccacgcccggctaattttttgtatttttaatagagacagggtttcaccgtgtcagccaggatggtctcaatctcctgacctcgtgatctgcccgcctcagcctcccaaagtgctgggattacaggcgtgagccaccgcggccctccccagtcctgttgatgccactgctggtcacatggataacccatctcactatcagtgacacactcagtgagacgcactgatgtccttatgctcgctcacacgcagacactcacatacctgcccttgtacactcacccaagtccacaacacacaggccgctggctccctctcactgccttctacttcacagatgaacatggtgtatacttctcacccagctgacacacacagacacacaccagctcccacgcagtccggaacgagctctcactcacaaagaacacacactgggccgggcgcggtggctcatgcctgtaatcccagcattttgggaggctgaggtgggcggatcacttgaggccaggagttcgagaccagcctggccagcatggcaaaacctcatctttactggccatgggagagccagcctctcccacggccccaaagagatcctttgggtctgttaaggccctcttgctttttatttttatttatttatttttttgggacagagtttctctctgttgcccaggctggagtgcaatggcgtgatctcgtctcactgcaagctctgcctcccggattcaagggattctcctgcctcagcctcccgagtaactgggattacagacacacgccaccaaatccagctaattttttgtatttttagtagagatgaggtttcaccatgttgaccagggtggtctcaaactcctgacctcaggtgatccggccgcctcagcctcccaaagtgctgggattacaagtgtgagccactgtgcccggcctatttttattgcttttggagacgaggtcttgctctatcacccaggctggagtgcagtggcactatcttagctcattgcagcctcaaattcctgggcttaagcaatcctccttcttcagcctcccaaagtgctgggatgacaggtatgctactgggaggcagaggttgcagtgagctgagattgcaccactgcactccagcctgggtgtcaaagtgagactctgtctcagaacacatacacacacattggctcacacaactgctccctcaaccccccgagttcttccatgcatatggtgcacacgtactggttctcatatctgctagcacaaagacacacacacacacacacacacacacacacacacacagtgtggctcacacattccagcacctgctgcagtacagacacatgaccctgagcaaactcccccgtttcttgcctccctgggggtcctgagggcatgggcacccacctcggccctcagcagtgtagcctgagccatgggggcacagcttcctgtaggcagaggtgccgggcaggggacagagctcgcagcggggcccccagccccggccacccccacagcagcactcggccctggtgacagcctcactgctgctggacagagaccggcacatggtctgcagcacctcggcaaagcagggcccctgccggatgtctgcagagaacaatgggaaagacaacggtcactccaggaggctggtttgggggcaaagactgagcttgctttggggcaagctgtattttgggggtgttggggacaggggtgtccaggagggagttggatacacaggacagatggccctagtgggtcaccggctggggttagctccccagaagtgggagatctggggaaggttggttccggggtgtggcgccagtaagttggaggaggcatggagggagcgtcccgctcttccagtatttaacagaagggacagagggaagaggggcagcaggggagcactggacatgtgtgtccggattagctcagcaaccccctgggttgcccgtcagtgccgcaggccccgtccctgccttggagggctcccagacagtgggagggacaggcagtgggagggacaggcagtggggggacaggcagtgggagggacaggcagtgggagggacaggcagtggggggaacaggcagtggagggaacaggcagtgggagggacagggagtgaagggggcaggcagtggggggaacaggcagtggggggggacaggcagtgggtgccacatggtaggtggttgcaaccactgtgcgtgtccagccacactcaccgtggcactcggtaagggtggggctgggctggaatccctcatcacagtcgcaccggaagctgcccgcggtgttgacacagcggccgttgacacagaggtcaggctgagcgtggcattcattgtcatctgagatgggaggggtgaggcaggtgggcggggaggccacaggcagccagcctctcccacagccccaaagggcccctttggatctgcccaggccctcttgcttatttttattttatttatttttattattattattattattattttttgagacagagtctcgctccgtttcccaggctggagtgcaattgcctgatcttgggtcactacaacgtccacctcccgggttcaagaaattcttctgcctcagcttcccaagtagctgggattacaggtgcccgccgccacgcccagctatttttttttttttttttgtatttttagtagagacggggtttcgccgtgttgtccaccctgttctcaaactcctaacctcagatgatccaaccgccttggtctcccaaagtgctaggattacaggcgtgaggcaccgtgcccagccttattttcatttttattgtttttggagatggggtctcactctgtcgtccaggctggagtgcagcggcactgtcctcccactgcctgtcacctccactacctgtccctcccactgcctgtccccccccactgcctgtccctcccattcattgaagcctcaaattcctgggctcaagcgatcctctcgcctcagcctcccaaagtgctgggatgacaggtatgagtcaccgtgcccggtccaaccctcttgctttgacctctcccttccacaaggagtttcctgcacccatgaagctccagtgccccatacctgtgcagccctccccagagccaggcaggggccgcatgcctgggggacagacgcacgcgaaggtaccgatgaggttcttgcactccatgccccgggcgtggcagtcctgctgaccatctgcacactcgtccacatcttcggatgaccagagacagatggtcagtcaaggccaggcaccctatggctgtggggacctggattccaccctgcgtcagccctgtgggacctgagtgagttccctgcagaccctgtcaaatgtctatccctcttaggaagggagcccccagctcctgcccagccccagcctccaagaagctgagggaatcaggaattgtcccccaaagcttgcatcccctgcccatgtcagggtctgtgagtctgctcatggcccctggaacactgaccctgaaacagccccagagacactgagtcccagaccagggtctcccacgcttgacactatgaacatttgggataggaaagttctttgcggtgggcggctgttctgtgtgcattgcaggatttttttttttttttttttttttttgaggcggagttttgctcttgtcgcccaggctggagtgcagtggcatgatctcggctcactgcaacctccgcctcccaggttcaagcgattctcctgtctctcagcctcccaagtagctgggattacaggcgtgtgccaccatgcccagctaattttgtatttttagtagagacagggttttaccatattagtcaggcctacctcgacacatggccccatcctcccgcagggtgtagccggctggacaggtgcacaggtaggagccctcggtattgtggcagcggaaggcacagagcagcgggttcagggagcattcgtcgatgtctggggaggccagtggaggtgccagctgggtagggactgagggcgggacctccactccctcccccaggcatctccgtcacacggcccaggtcctgggcaagcagagttgtaccctcgcaggtcatcatgaggccaggctcaaagccgtcagcacaggcacattcgaagcctccgatgacattggtgcatgtcccttgcccacaggggtggccgacagagcactcgtctgtgtctgggtgggagtaagggggtggtcagcacctgcagagggtcccccatcctcagtagcatcccatctgcctgcctgttgaccaccacagatcggagggggccagatcgaatgcacctctagtctggctatggggcaggcaagcggtatgtgtttagtgaatgaatgagtgaatgtgtgagcaagtgggcaggtaaaggaatgcatgagtgagcaagggagtgagtgaatgagcaagaagtgaatgaatgagccagtgaatgaaggagtgattaaaccagtaactgaaactgaggcaggagggtcatttgagcccaggagttccaaaagagcctgggtaacatagcaagacttcatctctaaaaaacatataaatgagtaagtgaatgaatggttaaatgaataagggaatgagtgagtaaaggggtgaatgagtgggtgaattactgagtgagtgaatggagaaatcagcaaggaagtgaatgaatgaacaagagggcaaatgaggaaacgaatgagtgactgaataagtgagtgaaagcatgaatgaatgagcaaaggaatgagtgagtaaatgaataaatgagtgattgaatgggtgaatgagcaaggagacaaatgaaggaacaaatgaatgagtgaacaaacaagcaagtgaatgaatgagggagcaaacgagtgaatgagtgaatgagtaaatgaatgagtgagtgaatgaatgagccagtgaataaatgaggtgtgaatgaatgagggagtgattgaatgaacaagtgaatgaatgaacaagcgaaggaatgagtgagcaaaggagtgaatgagtgagagaattagcaagtgaatgagtgagggggcaaatgagtgaatgagtgaataagtgagtaaatgaataagtgagtaaatgaataagtgagtgaatgagcaagtgaatgaatgacgtgtgaatgaatgagggagttagtgaattaataagtgaatgaatgaacaagtgaaggaatgagtgagccaaggagtgaatgagtgagtgaattggtaagtgaatgaataagggagtaaatgagtgagtgaatgagtgaatgaatgagaaaatgagtaagtgagtgagcaagtgaatgaatgagtcagtaaatgaataagtgaatgagtaaatgaataagtgagtgagtgaatgaatgagcaagaaaatgagtgagcaagtgaattaatgagtgaatgaagcacagagggagaaaaagtgaatgggggagagaggcagtggttaaggacaggatctcacccactgcctgggggtgtcttccctgccctgctctgctccttcctgtcctgggaggggcctgggacagagctggggaagggctggccactcacccacacagttgatgccagtgaagtccaggctgtagccaaagggacactcacagcggaaggatccatcggtgttgacacagacgccgttagtgcagacgccagggttctctgcacactcattcacgtctgcggatggcaggcgttgcagacatggcttctgtcaccacacaatcgccagagccctggccacactcaaggccccaaggggacaaaagcccaagccccaggctggcagggtccagggccacccaggctctcagggggagcctgaaactcagagacccaggcagtgcggagatggatctgggtggcccagaaggggctcttagcatgtgggtgaggggctcaccttctcgggagtcatccgggcctgggactgccccgtggccaaaggggcagagctcctgaaaggcagctggacggagagggggaggggagtcagagtcagggcctaggtgcagcccccaggtgtgtgcagggaaggatgagagaagaatgagagaggaaggtgagggcacatcatccagggagcctggacaggggtgggcactcaccgctgccctcctggggacacagttcgcaggggtctccccagccctccccaggcctcttactgcagcagcagcgggtcttggtggtgttgaaagctttgggcaccgagcacttcccagcctcaaaacgggtgaagcagaaactctgccgtgtgtctgtggggtgggggctccattaccctgattgaaagccgctggcagtgcccacctgcccctgtgacctcccgcaccccagtcctggtgaatgggttgtgctgatcctgccagtggccaatcagaacatgccatgcccctggtcatggtgattggtttgagtatggacatgtgacctactctgggccaatgaggatctgccctgggtttttagttgttgttgttggtggtggtggtggttttttttttttttcagatggagtcttcctctgttgaccaggctggagtgcagtggcacgatctcagctcactgcaacctctacctcccaggttcgagtgattctcctgcctcagcctcccaagtagctgggattacaggcatgtgccaccacacccggctaatttttgtatttttagtagagacggggtttcaccacattggctaggctggtctcaaactcctgacctcaggtgatcagcctgcctcagcctcccaaagtgctggtattacagtcatgagccaccgcccctggcctgccctggggttttgaggggacagctggaatcccaccccacttcattgctttggggtgttctcatgccaggaagaaagatcaaacttggtggttactcttggatcaaaaaccccttcctggagaggcaaaacgactgattccagaaagcccgaggatccaaacccccaatccttggctctggacacctatcaagtcctcaccagcaggctggggtcccagcctcccagaacagcaaatattcgctgaggtgaactgcatgctctgctctcacccttattgcccctgacctgtgagagaacaggctggctcaagctgggtgaggttagcccacagtagacaaggctagcccagctgaaacggagccagcccagagtagtctaggctagctcaaactggacaaaaccagcccattgacagcctacagtcatgtgaccaatacaaggaaaacctaaataagcacacacctagctcagaatggaccaggttagccctccatagacatgacctctatagccaagaggttgctggcactaggataactctgctaatgcaaacagacacctctgcctggtcagagctcccaaagggtcacacaagaaaccacagccctcttttctgggcaatctgacccttccccgccccacttcccaccctcttccctaagccctgtgtggacttaccaaagcaacggtgcccattgtcagagaggacaaagccaggtgggcagaggcactggaagctcccagggctgttggtacaggtgccaaagaggcagaggttgggctcctctgagcactcgtcgatatctggaagggcagggacatgagctgggtggggggcaagtaggacctccatcagtggggagaggactcagctgtgagaagggacagatggagtgcaggtccagccaggggctgcagtggggctggggtcctgagagctcagtatgagcttcagcacgaggtgggcattgtgtgtgcacgtaggtccttcccggaaggcatctccagagtaaaggtcatggtcaggaatagttcatgattggagactgaaactgcacatagtacaacctctatggaaaacagtgtggcgattccttaaagaactaaaagtaaggccgggcgcggtggctcatgcctgtaatcccagcactttgggaggtggaggcgggtggatcaccaggtcaggagattgagactatcctggctaacatggtgaaaccatctactaacaatacaaaaaaattagccgggtgtggtggtgggcgcctgtagtcccagctattctggaggctgaggtaggagaatggcatgaacccgggaggcagagcttgcagtgagctgagctcataccactgcacttgagcctgggtgacagagcgagactctgtctcaaaaaaaaaaaaccaaaaaactaaaagtagaactaccattcaatccagcaatcctactactgggtatctacccaaaggaaagtaagtcattatatgaaaaagacacacgcacatgcatgtttatagcaacacaattcacaatcgcaaaaatctggagccatcatatttataaatgcccatcagccaacgagtagataaagaaaatgtggtatataatacaccatggaatactactcagccacaaaatggaacgaaataggcacagtggctcacacctgtaatcccagcactttgggaggccaaggctggtggatcacttgagatcaggagctggagaccagcttggccaacatggtgaaaccctgtctctactgaaaatacagaaattagctgggcattgtggcggggcgcacctgtaatcccagctaccaggagggtgaggcaggagaatcgcttgaacccgggaggtggatattgcagtgagctgagactgtgccactccagtctgggtgacagagtgagactccaccaaaaaaaaaaaaaaaaaaaaaaaaaaggaacaaaataatgtcctttgcagcaacttggatggggctggaggccgttattctaagtgaagtaactcaggaatggaaaaccaaatatcgtatgttctcacttataagtgggagctaatctatgaggatgcaaaggcataataatgatataaaggactttggggacccccagggaaggatgggaggggggtgagggataaaagactacatactgggtacagtgtatactacttaggtgacaggtgcaccaaaatctcagaaatcaccactgaagaacttatccatgtaaccaaaaaccacctgttcccccataactattgaaattaaaataagaaaaaatagaaaaaaaaaatttaaaccttaaaaaaagaaaattgcacaaagctaactgagactggatatatttaccctacaccggacagggttaactcatgttgtactaagctagcccaaatagaatagatcagaataggccgggcatggtgactcatgcctgcaatcccagcactttggtaggctgaggtgggaggatcgcttgaggtcaggagtttgacaccagcctggccatcatggtgaaaccccgtttctactaaaaatacaaaaattgggcctggcgcaatggctcatgcctgtaatcccagcactttgggaggccaaggcgggcagatcacgaggtcaggagatcgagagcatcctggctaacatggtgaaaccccgtctctactaaaaatacaaaaaaatagccgggcatggtggcgggcgcctgtagtcccagctatttgggaggttgaggcaggagaatggcgtgaacctgggaggcggagcttgcagtgagccgagattgtgccactgcactccagcctgggggatagagtgagactccgtctcaaaaaaaataaacaattagccaggcatggtgatgagtgactgtaatcccagctactcaggaggctgaggcaggagaatctcttgaacccgggaggtggcggttgcagtgagctgagagtgagactcctctcaaaacaaaacaaacaaaaaacaaacaaacaaacaaaacaaaacaacaacaaaaaaaggatagatcagaagagcccaggccagactggtccacgttagctcaggttatacaaggctagcccagatggaagcctggatcagaggtattcaggccagactggttcaggttagcccaggctagcccatctgctcaagccagactggtccaggttagaccacagtgaacaaagcagcccatctgctcagcccaggctggtccaggttagcccacactctctgaggctagtccaagtggataaatggaccaaaggagattaggccagacttgttagtccagactgcatgaaatcatctctatgggtgattacaccggtgaagcttaggccagactggtccttgatctccagttagcaagtgaggagctctacatttgggtgcactgagaaacggtgagaccccacacccatgtcaatttataggattcatgaggaagcctgtgggcactagagacaaagtcctgagtgcagagtccagaaacaatcagaatgacaataatagtttatgaagctgtgtttgacgctgcgttaagtacatctccaccttcatcacaaccctagctggtattcccattttatggatggagaaagagaggcactccctggcgccagaaacgggagtggggctggacactcaccaatgcagtggtcactctgcacctggaagccagggggacagatgcagcggaaggagccctcgaggttctggcaagtgccgggtaggcaggttcctgcaaggctgaggcactcattggtgtctgtgaaaaggaggaagaaaggtccttgtgccagccaggatgcagggggctcacttgggactgggaccaacacctgcaatcactgtgtgatcactgagggccccaggacaagccctcccagtggcaattctggctccagggcaagggctgagactcaggacgacagggacagctggggaaggattatctgactctcgtggggttataggtggggcagatggtgtccagtggaaagaggtagcaagattcctaatctggcaccaccagcagattccttccatggtatctatttagcgcttctactattctttgcttctggaaagttacattttcaagacagcctcaccctacacaacaaaccccatacatagaaacataggtttgatgtgctgattttataattattttatttatttatttattttgagataggatctttccctgttgcccaggctggatgcggtggtgtgatcatagctcactgcatcctcaaactcctgggctcaagtgattctcctgccccagcctcctgagtagctaggactacaggcaatagccaccactcctggctaatttaaatttctttgtagagacgaggactcactatgttgcccaggctagtctcaaactcctggcctcaagcaatccttctgcctcagcctcccaaagtgctgggtatttttttttttaaatcttaaaataaatgcttgggtagtaaatggatctatgctcacccagaagtaccaaactgtggtgtacatggagcaggggctggctgagatgcctccgagcaccataggcagactcacccacacagttcttcccatcagctgtgagctcaaagccatcctggcagaggcagtggaaggaaccagctgtgttgaggcaatggccaaatcggcacacctgccccaccagggtagtacactcatcaaaatctgtagaggggagatgggcaggccagttcacccacaaaacttgaagggatcaaaccttccttgtacttctgtccacaactgagttgagctgacagcattggcttcaacttgagcactcatgtatagactatgtatattagccttctacctatcttatgaggtagttgctgatattttctaatataaccatgtaatgctatgaatttgcctctaagtgcccccttagctgcatcctatgtattttcatatgttatgctttcattttcattttcttttacttcaaaatattttctaattttccttatgatttatttgacctatggattatttaggagtatgttatttaatttctaaataatcggggactttctgggcatctttctgtggccaatttctagattcacttccttagattctgagaacccactttgtggccagcctgccacctgagccgactcacccacacaatccccattgtgtgtcaccacaaagccagggaagcagaggcagttgtaggagccaatgatgttcttgcaggtcccatttccacaaggctgccggtcacactcgtcaatgtctgcagaagcaaagccgagagcccaacccagctcacccagggcattggggaacttggggagtgagaggccagctggacctagcactcctcccctgcacctagccctgcctagatgactgggcagtgacccctggcggtgatggctgggaagtactcctggtatgatatatcacccccattttacagatgggaaaactgaggcacagggaggcagatcaaccatttacccaagatcttaatctcaggacccaaacttggatctctttgtgaactaggatggacagaaacaccacttccatcccaggggaggtttagaccccaggcagcctggcttgaaaaggagggggaagataagggtctcacccatgcacagggtctggtctgcagaggcctggaatccacggtgacacagacacatgtagctgccttctgtgtccatgcagtcaccatggctacagacattcgggatctcccgacactcattccgtcctgggggtgcagagagcatggtgttcccagggctcctaccacagtgtttgcctgagctctccctactgcaatggggaagccagaatctgccttgaagttccccactcaaacttccaccaggggcgtcaggctgtctgcatggacctgagctctcacctctatcacatcctattaacagacactctcaatacatcccccacccccctaatagtatagaaaaggagaaagacctggacagagccataccccatctaagtccccatgggtgacagagcccagctccctcacctcctcccagggaccctgctcacccacacaagccccgcctggcgacagtttgtaccctcgggtgcacttgcagcggtagctaccggggatgttgatgcagtcagcattctgctggcagggactctccctgctgccacactcatcgacatctgggaaaatacagcaaatgaggtgggggtgacagagaagcccatcctgacagaatcaaacgtgaaacccagtccactgcttcggagcaggtggtttctctggaagcagccagagctggagtaagggtggttatatgagatggaggcccttggaaaggtgttagcccattatacatacagggaaatggaggcttacagagttttagttactcgcccagattgcacagtggcggacatgcatcccacccaggccccagggctgggaacagggagaggtggcaccttcacaagccagcaggatgctgttgtagttgaagcctgcggggcactcgcagcggaaactcccgatctggtttatgcagatgccattggcacagatggcggggatctccccacactcatcaatgtctgcagaaggcatctgccatcaggggcagcccagccccctgggacttccagcgatgctgagcgaagggacccactagccctgcaatctggttgaggctgttgtggccacaaaccagcacacactcaagaaaatcttgctgtgaccaaaatacatccgctcacaccagaaagaggtgaggagtgggaggaaagacaagagcagagagactgtgtgtgtttttctcaattaaaaatacacacttcctgtgacccagcaaccctgctggaaagaaatggccttaagcgtaagcaggacagcggtatgagatgctatttagcaagaaactggaaacatcaactgatgaatgcagagcaaaatatgggatgtctgtaccatggaatattcttcagccttattaaggagtaaagccctgtaacatgtgacaatgtggttgaaacctaaaatcattctgctaagagaagccagacatgaaagaacaatattgcatgactccatttaaaggaaatgtccagaagtagcaaatcaatagagacagaaagtcgatttgtggttgccaggggcagaagggaggggctaaagggagagactgctaataggcacagggtttacttttgtgtgatgaaaatgttttaaacttagattgaggcgatggttgtgtaacactgtgaatgtactcaaaaccactaaagagggcactttaaatgggtgaagtgtgtggtatgtgaattatatctcaataaagctgttatatataaacaatctaaatgtccatcagtaggggactggaaacaacctaagtgtccatcaaaaggggacttgaaagaacctaagtgtccatcaatgggggactgaaaacaatataagtgtccatcagtaggggactggaaacaaactaagtgtcaatcaatgggggacaggaaacaacctaagtgtcaatcaatgggggactggaaataacctaagtgcccatcaataggggacgggaaacaacctaaacaggcatcagtgggggactggaaacaaactaagtgtccatcagtgggggactggaaacaaactaagtgtccatcagtgggggactggaaacaaactaagtgtccatcagtgggggactgggaacaaactaagtgtccatcagtgggggactggaaacaacctaaatatccatcagtgggggactggaaacatactaagtgtccatcaatgggggactgtgatgaaaatgttctttttgtgtgatgaaaatgagttctaaacttatactgaggtgatggttgcataactctgtgaatgtattcaaaaccactaaacagggcactttaaatgggtgaagtgtgtggtatgtgaattatctctcaataaaactgttataaacaatataagtgtccatccaaaggggactggaaacaatccacctatctatcaataggggactggaaacaatccaagtgtccatcaaaaggagatctgaaacaacctaagtgtccatcagtgggggactggaaattacctaagttcccatcactgggggacctgggatgtatctgcaccatgaaacacttttaggcagggcaaagagagaggctgcacagcagatagtaacctggccggttcttcaagacacaatttggacgaaaaaagcaagttgtaaccaacatgtcaagcattacatcatttacgtaaaatgccccagaaaccaatgtcatatattttcagtgggggacctattatgtaatgaaggaagaaaaaactagaaagaaatattccagccataaagcataagaacgtccagagagggagaaaagagacagagttgaggtgatgactggaggagaagtgggttttatttgtcatggtttgattttttttttttttttttttttgcaacggagtcttgctctgtcgcccaggctagagtacagtggcacgatctcggctcactgcaagctccatctcctgggttcacgccattctcctgcctcagcctcccgagtagctgggactacaggcgcccgccaccacgcccggctaattttttgtatttttagtagagacggggtttcaccttgttagccaggatggtctcgatctcctgacctcgtgatccgcctgcctcggcctcccaaagtgctgggattacaggtgtgagccaccacgcccggccgccatggtttgatttttttaaaaaataaggagaatatattcagaggattaaaacaaatgaaaatgaattcatcagttaaacactgcatagttgacatttgggatgcaggtgttaaattatgcaatacgttgttaaaaagggagtattctggccaggctcagtggctcacacctgtaatcccagcactttgggaggctgaggtgggtggatcacctgagatcaggagttcgagaccagcctgaccaacatggtgaaaccctgcctctattaaaatacaaaaattagccaggcatggtggcaggtgcctataatctcagctactcgggaggctgaggcaggagaatcgcttgaacccaggaggcagaggttgcagtaagttgagatagtgccattgcactccagcctgggcaacaagagagaaactccatctcaaaaaaaaaaaaaaagggcatggagcaatttgacacaaactgcaacacggatgcaccttgaggacatcatgttcagtgaaataagcctgacacaaaacaacaaatcctacgtggttccactcacaggaggtccctagaaccgtcagattcacagagtcagaaagtagaatggtgggttccagggactgagggggatggggagtgagagtttcatggggacagagtttcagtgggaggagatgagaaagttccggatggtgatagttgcaaaacagtgaaagtgtacttaatgccactgaactgcacactaaaaatggttcaaatgatactttctcggagacaaaaaaaaaaaagtcttactctatccctcaggctggagtgcaatggcgagatatcggctcactgcaacctttgcctcctgggttcaagcaattctcatgcctcagcctcccgagtagctgggattacaggcatgcaccaccatgcccagctaatttttgtatttttagtagagacacggtttcaccatgttggctaggctggtctcaaactcctgacctcaggtgatccacccacctcggcctcccaaagtgctgggatgacaggcatgagccactgtgcatggctcgaatggtaaattttatgttgcatatattttactatcattttaaaaaatggataatggtttaataaaaatagtgtcattctttttttaaaaagaagtgttattgagggcaggattcctggggagttggaggtgtgtggagcgaggaggaggggaggatggaggagtggatgtaaggaaaagagctgttgaggaggggaggggtgggaggaagcagacccaggtggatgggtgcccagggatagagcagggaccactcactcaccaaggggcttccccgtgtggatgtcagtgaggaatcccggggcctgatttccacacaggatctggtagtcagctgcgcaaaggggaacaaagctgagtctggggctgcaggcctgaccccagcccgctcccaatctggaggggacacctcatccctggagcccagccctcacctggccaccttgaactttttttgctctccccaccctttccctccttccacttatttaatttaatttttttgagacaaagtctcgttctgtcacccaggctggagtgcactggtgcaatcacggctcactgcagccttaacctcccaggttcaggtgaccctcccaccttagcctcccaagtagctgggattacaggcgtgagccacgacgtctggtttttaaagccacctagtttgcagtaatgttttgcagcagctctggggaatgaatacagctataagcccctagaagtccccttcccatcactgtcccattcctgcagctcctcctggtgcctgggctggctgctagatcattccaacaggactcattcctgctgtcaacacactctgttcagtcctgcctccaggccttggctcctgctgtgcccctgcctagaacgccttccctcatcctgaccgatgttcccatcagggtcccaatcttggctctgagcttctccaggtctgccccttccccagcccaggaggtctatggtatctctaaccagctgtgctttcctccctggcctgggacatttaccgaccccctcccaccctatcccagcccaggaggtctatggtatctctaaccagcggtgctttcctccctggcctgggacatttaccgaccccctcccactttatcccagccccagctactcctgtgaatcttcaagggcctttcccaccaatgaaaactccattgatccatcctgaattctcgaaatctgcaaaatggaagaaaagctgccttgctcactttaaaatattgccttccatacatggggactgacacagtttggctgtgtccccacctaaacctcaacttgaactgtagctcccatatccccacatgtcacgggagggacccggtgggaggtaactgagtcatgggggtgggtctttcccatgctattctcgtgatagtgaataaatctcgtgagatctgacagttttataaagggcagttcccctgcacgcgctctcttgcctgccaccatgtaagacgtgcttttgctcctccttcaccttctgccatgattgtgaggccttcccagttatgtggaactgcgagtccattaaagtcctcctttttttttatttttttattttttttttgagatggagtcttgctctgtcacccaggctggagcgcagtggcatgatcgcggctcactggaaaccccacttcccgggttcaagcgattctcttgcctcagcctcccaagtagctgggattacgggcctgcgccaccacacccagctaatttttttggtatttttagtagagacagggtttcactgtgttggccaggctgttttcgaatgcctgacctcaagtgatccacccgcctcggcctcccaaaatgctgggattataggtgtgagccaccacacccagccaaacctctttttctttataaattacccagtatccagtatttcttcacagcagtatgagaatggactaatagagggacaaaacttcaactctctggctctcatcagaacaaggaggattaatctaagaaccctaagggcactgtgtttccttaaccattatgctaggaggggccaggctgggaagaaggttggggagggttactcacgactgatgggagtggggcaggcctcacagggtctattccaggcctggccaatgttgtaggagcagcaacacattttccgggtcacgttgaaggccagctcattttgacatgtgccgttatagtgccggaagcagacactcttcctcatatctgtagttggcacaaaggagaagaatgtgggtaagggtcacctaaatcagtggaagagggagccaaagagataggaactccttaactgattcatttgaagattactggcttgtccaggcacagtggctcatgcctgtaatcccagcactttgggaggcggaggcgggcggatcacttgaggtcaggagtttgagaccagcctggccaacatggtgaaaccctgtctctactaaaaatacaaaaattagctaggtgtggtggcacacgcctgtaatcccagctacttgggaggctgaggcaggagaatcgcttgaacctgggaggtggaggttgcagtgagccgagattgtgccactgcactccagcctgggtgacagagtgagactctatctcaaaaaaaaaaaaaaaaaaagattactggctggcttgattggcttgatgtctctcccccaacacacttgggggatccattcacttttttcagccttttttgagcagtgcacaacctgagcaactgttcatggcagctctgggctcctgagtcctgcagctttgtttactgccacatgtcagcacttcatatatgcttaccctccctctccataggcttgaaggctcccagcagttcctcccatgcccaggtgctgcttctgtgactgccagttccctaggtcatcacgcttcttacccatgcagttgttgccaccattgacttggaggtactctgcagggcagacacaggtgtagttccccagggtgttgtagcaggtgccagggccacagatgccggagtgtgtggagcattcgtcaatatctgcagggaaagaaggggtggaggggaacagtgggcagcgtccaggaattgtctgaataactccactccagagacccagcaaggccacttcaccagggacctaagtttggtttcaaaatcagtttaaaacgcacacacatcttagtgatgaagaaagctataatatgggctgggcatggtggctcatgcctgtaatctgagcactttgtgatgctgaggtgggaggatcatttgagcccggagttcgagaccagtctgggcaacatagcaagaccccatctctactaaaaattttaaaaaattagctgggcatggtggtgcatgcctgcagtcccagccacttgggaggatcacttgagtccaggaggttaaggttgcagtgagccgtgatcacgcctctgcactccagcctgggtgcagaatgagatcctggctctaaaaaacaaacaaacgaacaaaaacaatatgacattaagtgaaaaaaaaaaaaaaaaaacatttacaagctggatgcagtggctcatgcctatcatccctgctttgggaggccaaggcaggaggatcatttgaggtcaagagtttgagaccagcctgggcaacatagtgaggtcccatctctacaaaaaatgaaaatttagctgggcatggtggcacacgcctgtggtcccagctacttgagaggcagaggtgggaggatcacctgagtccaggaggtcaagactacagcaagctgtgattacaccactgcactccagcctggacaacagagtgagacactggctctaaaaaaaaaaaaaaaaattcctaaaaataaagttgatgatgatactgcttctattaggaacaaaatgacctgagttcatgagtcagttttataatcaccaagaaaggatcatccatgtcttcctaatatgatatgataggaatcaaggaccttatggataaagtattcttgggggaaaaaaattgattctcaatctggtcattactctagtccaggggtagtaagctttttctgtaaagggccagaacattttggttttgcgggccaaactacagtgtgccatgattattcaatctgccaatgtagcaagaaagcagacacaaacaatatgcaaacacactgtggcactggctgtgctccaaggaaattttatttatggacccctgaaatttgaattttatataactttcttttcttttcttctttcttccttcttctctttctttctttcttctctttctttctctctctttctctctctttctttcttttattttttttgagacagagtctcactctgttgcccaggctagagtgcagtggcctcatcttggctcactgcaacctccgcctcccaggttcaagtgattctcctgcctcagcctcccgagtagctgggactataggcatgtgtcactatgcccggctaatttttgtatttttagtagagatggggtttcactatgttggccaggctggtctcgaactcctgacctcgtgatctgcccacctcggcctcccaaagagctgggattacaagcatgagccactgtgcccagtcttttttttcttttttttttttttaagacagggtctcgttctgtcacccaggctggagtacagtggcacaatcacggctcactgcagcctcgacttccgaggctcaagtgatcctcctgcctcagcctcccaagtagctgggattacaggcgtgagtcaccatgcccagctatttttttaattttttgtagagacaaggttttgccatgttgcccaggtgggtcttaaactcctggcctcaagcaatcctcccacttcagcctcccaaagtactgggattaccagcttgagctgccacgcacccagccttgaatttcatataattttcatgtgtcacaaaatgttattcttcttttggttttttcaaccgttgagaaaagtgtaataaagtattcttagctagcaggcaaaaataggtagtggaatattagcatggtaagagtgatgtcaccaaaaatagcagagcagggaactccagggctccattcctccacaaaagcaactattgagctggcaaaacagacaaaaataaacttttgcagaactctggaatcagtcaaaagcttacaacatccagacaaagatatggtgaagaaggaagctgctgtacttcataagggagtgtcgtggcattttaaagggtctatctaccatcccccacaccacagatccacagcagccatgaacatcttaaaggcagcaagagagaactgacagatcatgacaaaagaggaggcagggggcagaagcctttccatgaggccttccctcctctacccttgtgaggcttggcagggcaggaaggcagggagagagcggaagagcctgacccaccccaaagagaatccatgctcaccctcacagatgcgggtgtgctcactgaggtggtagccaggtgggcactcacactggaaactgccaaacgtgttgacgcagtcacccccctgacacagccctggcagctcttggcactcgtcgatgtctgtcaggaagtaaggaagccaagcttgggagctaaacccatgcagaggacttaaggggcacccacaccatgctctgggttctccagggccctctcgaggatccccaagtgctgtccatgactgatagacatttaaagggtctatcttgatggctggacacagattctcttgagttaatgttaccctaaattcaactccattcccttcatctgttagtccattctcccatccaccacatagtttcctctagatagagaaatagatagttttcttcctctagatggagaatagtcttctccaaccttgtcactccctatagaaaggatggatgggaggatggatgaatggatggatgagtggatggatgcatggatatgaaacagtggatgggtaaataagcaagtgggtcaatgaataagatgatgagtgagtggatggataggaaggtggatggataggtgagtagacaggcaaatgagtgaatgggtggataagtggatggatggatggatggatgaatggatgaatagatgggagatagaagatggatggaagggtggatgaatgggggaatagaaagggagtagggaacgggtggatgggaaatgggtggatggatgagtggatggatggatgtattgaggatggatgggtgaatgggggatagatggatgggtgaatagatggatagaagaatgagagataggtgggtgggagatggatggatgggagagtgggaaataggttaatggatgggtgaatgcgggctagatgaaggatggggggtggatggatgggtgaatggatggatacaaggatagcagagggatgagtgatgaatggatgaatgggtggatggggcatggttggatggaaggatggagggatggatggaaggatggatgaatggaaggatggatgaatgggtagataaaggatagttggatggaaggaaggatagatgaatgggtagatgggggatggttgggtggaaggatggatggatggaaggatgggtggatggaaggataaatggacagaaggaggggggatggatgaaaggatggaggatagatgaaggatgggggataaatgggtgaatggatggatagaaggataggaggggaataagtggggggatggatgaatgggtagatggagaatggttggatgggtggaaggatgaatggatgaaaggatgagtggaaggatagatgaatggatggatggtcgagtggaaggatggatggatggatggatggatggatgaatggatggaaggatgagtggaaggatggatgaatggatggatggtcgggtggaaggatggatggatggatggatggatggagggatgaatggacagaaagatgggggatagatgaaggatggggaatgaatggttgactagatggatggataaaaggataagagagggatgagtggaggatggatgaatgggtagatggaggatggttgaatggaagtatggaagtatggaaggaagaatggatggaggatggctggatggaaggatgtatggatgtactggatggatggaaaaaatggaaggatggatggatggatggatagatggatgaatggctggatggatgggtagaaggatggatgaatggatggaaggatgggtggatggaaggataaatggacagaaggatggaggatgaatggaaggatgggggacaaatgaaaagatcaataaaccaacaagtggaagaaatggctgaaagaacagataaaaaaaattaaacacaaactaaaagcatagtgtggtcctgctgctcagcctccaggtggaaagatctgccccatcccaggacaaaactactcaactctacactttggtgaggtggggatgagagaaaagtcagtctctaggcagacagatggatggatgatctgccaggaactcaccttccagaatgacagtgatgcggttaggctggaagccctcaccacccgggcacagggttctgtactcagctgtaaagggaaacaggctcctgtgaggtggggtattggggcaaagcttaggggaaacaggggagcaacagcaggaagcctgaaaagggctcaagagtgggctcccatccttctactgtactaacgacatccccatatctctttagcctcttggggccaagagactttggccagtcctggggctgcttgcgtgtgtgtgtgcatgtgcgtgtgcatgcgtgtgtgtgtgtaaatgtgggttcccattcaacatgtgagcagagttatgtggtagtggctgggggtaggagggagagaagattattccttctgatccaaaaccatatcctagtgtaactgcaagttttccccatgcaaggaagaccttggacattcacacacgcatacacctgaataggtggacaggtacctccctgtttcacacctgaggcctttgcacatactgttctcactgcattgcacatcattccccctactctgctaggaaaactcctacacatccttcaaaacctcactcaagcctcctcccctggaaagccttccccagagctttcacttccccacagctttctcctgagctatgggtatgcctcaaagaaaacccttaggacagttctactctcacagtcctgaaactgttgatttaagggtgagggagaagcagcgtgcagaggctgtggctcatccttctctgagtccccagtccccagcacatgacacagaggaactctcaatatttgttgactgactgagtgatcaagtgactataaacacagagaatttacagaaagcgaccttggagagaggcccagccaatgaactaccaagacgtacactgtgtgacccaggatgagcccctctcctcccccagttcttggttttcctgtcgcctaagccccccaccaccgccattagcagaggtgaccccctaagctcccgggcctcggtggcttaggtcacggtgttcaactgccccgcagggactcactggtgttggccatagggcacagctcacagggattgccccaagcccggcccagggagcaacagcaggaagctcgggtgacaccaactccgatctcggcactgcaggaaatgccactgtcccctcggtcatgcgtctccaggaaacagttcccggcccgagtgtctgaacaggcagaaggggatggttagtaggtgtcagagggaaagctgtatgtgtgcgtgtgcatgcatgtgtctatttcaacaggtgacaaggacaaccactcttgcaggagaccagcagatgtcccgtttgtcaggagcaggtagatttgaacacgttgacatctgagttaacccagtggggcaatcccacccacctctgctgaccccagaaccctgatctggagttgagcatggactcacccacgcagcccactccgctggggttcagctcaaaatcctgggggcagctgcagaggtagctgccgggggtgttaatgcacacgccgttgatgcagtttactgggtctgcacactcgttgatgtctgtagggaggaagcgcggtcctcagcagggagccccttcctcggcccccctccctcctagcttcatcctgggaagctacagccctcgctcaaggtcaactcctgggcaccagattgtgggacaatgtcatgtccttccctgggaagaaacctaaggggacaggagcctccagtctgtcctgtcccctccaaccccattccctctcctgctctgttctgcctggcagagttttgttcattgaactctacctgccctgggttccatgcagtcaacatatgaaaatcatatctattttatttccgtaatttattgatgtttagagacagggtcttgctgtgtcgaccaggctggagtgcagttgcacaatcacggctcactgcagcctcaaactcctgggctcaagcgatccttctgcctcagcctttggagtagctgggactacaggtgtgcaccacaatgcccagctaattttttatttttactttttagagatgaggtctcgctatgttgctcaggctggtctccaactcctggcctggagtgatcctcccacctcagcctcccaaagtgctgagattatgggcatgagccaccactcccagccaaaacccatatatagaaaatactttcaaaccatgggttagcaaattccaacctgtaggtcaaatccggtccaccacctgtttgtgtcaataaagttttattggtacaggggccacattcattcatttacatattgcttgtggctgcttttgagctacaatggcagagttgaatcattgtgacagagactgactgtgtggcctgcaaagccaaaaatatttaccacctgcccatttctaaaacacacagaggtaggagaccctttcagcagctagcgtggaggggccacttcaatcacagaacttatttagcaggcgaacaggaacgggaaatgatggggacatcaggcaaggcgccccccaccccccagcaagactgcaggggaggatgcttgaaaagagatctgagggcagtgagggagtgagccatgtcccctgccccaactcctgctctctcctctccccttccagcccagatgacctcacacctgtgcagttgccaccccctcggtccagttcgtagccaccattgcagatgcagcggaacattccaggcaggttctcacagctcccaaatgcacagaggttcccttgcgcacactcgtccacatctgcggggaccctgggtcagcctgccccacccagagtctgcaggggggacctacccactctgtcctctgccctggcgggcccaaccttaccctggcaggcccggtggtcctcggtggggtcaaagcccatctcacattcacagcggtacccgccgggcgcattgaggcactgcccgttgtcacagaggtccacgttctcggcacattcatccctgtctgaggggccccaagattcggagggctggaggccggtggaccaggacccacacagggtgggcaggaggccccagtcactggaacacttcgctgtcagccagagtcccaggcaagtagccctggggactcagtccctgacttgggggtgggaggcgagtgaccgaggcagggacagggaggggagaggtggtctggactcttggactccagagaggggacccagtctctctggatccagggaggagggcagccaggaaggaagcgtctcatgcacttaagtgttcaagggagccgtgggcaggccgcagcaccgcctgggccgaggacacagcctctccagcacccacagagcggcgattgagtcagaaggagtcaggaggtcgagtgaccatggcagccaccgtgaattcagcccccgtggctgtccctctagggcccctgccctcccacccctctaatctcaccttcgcagaagaagccatccccggcaaagccctggcggcaggtgcagcggtaggagccagggacattgagacagtcacctcttgggctgcaccggtgctcctgggagacgcattcatccaggtctgcaggagatggagcccagaccccccaccccatggtgtgtgcattgggtgggcgcagaagggagaaagacccatcaaccctccaaccctgactgcccccctgcagacactcccggatcccaccctcccactgccttgccccccaccgccttgccccccacctacctctactgctttgcccccactccctgcccccaggtactcaccgtgacattcgaagccatcccccacccagcctggcaggcacctacagctgaaactccccgggatgttgagacaggaggcgtgactgtcacagttgtgtcctccaacctcgcattcatccacatctaaagggagaggaggcacgacgccaagacccagtcacagaaggaaagactcgatgcaatagcagcggaaagggcagggactcttcctctctaggggagagctggcccagaaagcctcctcccattcacctggggagcttccatctttacccagagcccaagaggaaaaccccgaaacccaacagacatgactctcagcagccctcagaaatggcctgaaatagcagcatgaaagacttggggtagatattaagagtgactgtccagccgggtgcggtggctcacgcctgtaatcccagcactttgggaggccgaggcgggtggatcacgaggtcaggagatcgagaccatcctggctaatgcggtgaaaccctgtctctactaaaaatacaaaaaaaaaattagccaggcgtggtggcaggtgcctgtagtcccagctactcaggacgctgaggcaggagaatggcgtgaacccgagaggcggagcttgcagtgagcagaggttgtgccactgcactctagcctgggcgacagagtgagactccgtctcaaaaaaataaataaataaaaaaataaaaaagtgactgtccgtatgaacacgccccttttccaagccaggatttccctgtccaccagcatttccaatccagagtcaattatgcctcacccttatgatctctgccatgttaaaccttggtgagctgctgttactaaacatttctttcccacacttctgttttccctgacataaattgtgttttaaaagacaattttggatcaacatcaacaacctctaagaagtcataggcttgatgctctgttatgtaacacttgtttctaatacacattaaaataaccatgtaactggagtggatagaattgtgtccccttaaaaggtatgctcaagtcctaaaccctgaaactggtgaatgtgaccttatttggaaacagggtcttcgtagatgtaactaagttaagatgaggtcatcccggattagtgtaggctcccatccagtgatgagtgttcttttgagaaggctgtgtagccagatgcaatggcttacacctgtaatcccaactacttgggaggccaaggtgggaggatcgcttgaggcaaggagtttgagacgaggttgggcaacatagtgagaacctgtttctacaaaaacacttttttttccccctgaggcatggtttcactctgtcacccaggctggagtgcagtgcaatggtgcaatcatagctcactgcagcctggatctcctggtcttaagcaatcctcagcctcttgagtagctaagactacaggtgagcgccagcatgcctggctattttttaaaatttttatctcaaacacctgagctcaagaatccttccacctcaatctcccaaagtgctggcattacagaaatgagtcaccatgcctgatcaacaaacacttttttaaaaattagcccagcttggtggcatgcacctgtagtcccagatactcaggaggctgaggctgggaggattgcttgaacccaggagtttaaggctatgaactagttcatgagctatgatcacaccactgcactatagcctgggcgacacagcgagacctcatctttacaaattagatactactgggtgcagtgactcgtgcctgtaatcccaacaaattgggaggccgaggcaagaggattacttgagtccaggagttcaagaccaacccgggcgacatagtaaaacactatctctacaaaaaaaaaaaaaaaaattagctgagtgtggcggcacgtgtgggaggctgaggtgggaagatcacctgagcctggagaggtggaggctgcagtgagctatgattgtgtcactgcactccagcctgggagacagagtgagacactatctcacaaaaataaataaataataaataaaatgtaaaacatgaaaaataaaaaaaaatagatacacagagagaagaaggccgtgtgaagatggagacagagactggaatgacacatctacaagctgaggaacagcaaggaggcatggaacactttctgcctctgagcccccaagaaggtactaaccctgtagacaccttgatttcagacttctggcttccagaactattattctagaaggagaatcaatttctttttaattaaaaaaaagtttgtttttttgagatggagtcttgctctgtggcccaagctggagtgcagtggtgtgatcttggctcactgcaacctccgcctcctggattcaagtgatgctcctgcctcagcctcccaagcagctgggattacaggcgtgcgccaccacgcccagctaattttgtatttttagtagtgacggggtttcaccatgttggccaggctggtctcaaactcctgacctcaggtaatccacccacctcagcccccaaagtgctgggattacaggtgtgagctaccctgcccaggctaatttttaaaatttttaatatagatggggttgctgtctctattaatgttgccatatggccgtgttgtgatgtatccatgtcacccaggctggtctcgaacccatgggctcaagcagtcctcctgctttggcctcccaaagtgctgggattacaaaagtgtgagccactgcaccaggcggagaatcattttacttattttctttttttttttgagacggagtctggctctgtcacccaggctggagtgcagtggctcgacctcggctcactgcaagcttcgcctcctgggttcacgccattctcctgcctcagcctcctgaatttacttattttcttttgagacggggtctcactctgttgcccaggctagaatgcagtggtgctatcttggctcactgccacctctgcctcccgggttcaaatgattctcctgccccagcctcccgagtagctgggattactatgcctggctaatttttgtatttttagtagagatgggtttcaccatgttgaccagactggtctcgaactcctgacctcaggtgatctgcccgcctcggcctcccaaagtgctgggattacaggcatgagccaccgcgcccggcccagagaatcaatttctaagccaccaattgtgtgatcatttgttatggcagccacagggaactaacacagtcactattcaaatgtttaagtgttcatccctgtattgcatcaaattatgagggattcacgtttcagaaatgctgctgcagacacttggggcttcccttcctgagctgttcaggggaccccccggggcactgtataggactctgttcttgctttaacacaagaagccatccgtggaaatctatgagaatgaattctggctgtgctctgccctgggggatggaaacagaccccatgattcccaaaatggccccggggagtcccctctgcctgcaccgctgaccgccggctcaccagagcagcctgtggcccccttcctgaccatgtagcccagctgacagtggcagacaaaggaacccttcgtgttctcgcagtccccatggaggcagatgtgagggttcaggtcacactcatccacatctgttggggaagagagcatgaggtctgaggactgggtgcaggggtgacaggagaggaagtaggtgagggtgggagggagatcaccagcattcctgactgtcccgccgcacaggtcctctctgctaggactctctttcttttctccaggggcggggagctccctctatgtccactactgggcaattgggaatgttctgtgagcgtttcacagtgtacattccaaggaacacaccaggaatgtgtttccaaaagtattttatggtcaaatatatttagagaaggctgagatccacaaagctaaccagggtttcctcctgcaggacttttcagagcctttatgccaatatgcacagtgggtctgcaacaggggcatggagcagactgcattccctaaatgcatttgttcacaaggcccatcgctgaagcacttgctctctgagactcctataaactgcaactctctaagctctttaagcttcactcggtttcttggccgggagttacattgttacttcccggaacttccacactctggcctcagctttgtcctgatagggtatgcagtacacatctgctccccaggccctaggacaacctgtagccaggtgaggacagcagtcgccaccttagagaacagagttctgagtctctttcctgccttgtccactgtcctctgccagaaacccctttgtcttcagtgatcttaaagcacagcccttgaacaggacacaatcctctgatagatgttgggtatgtcatattaaacaaatgccatttaaaagagcaaggtttggggaattctgcttctgttatataaatgggatctcatgggctttggagagcagacttggggtgctggggacccttatgtggagaagcaagtgctgttacaaagcctcatcttcctacctgcgaatggcaggggtggggcctggcatttttcatgcctatgtgccaccttgtggaagacctggtgtgtgaattctgacactgcctcctccacccgccccgccccaccgtcccggctcctcaccaacacatgtcctcatgtctggcgtggccatgaagccatcatagcacaggcagcggtgaccccctggcatgttggtgcagtggccttggtcacaaacgcgggggttctcttcacactcgtccacgtctgggggagcagggttggggactgtgcttagctttgccctgatagaccacccagtacacatctgctccccaggccccaggacgacctgtagccaggtgaggatagcgatggtcactcgagtagtctgggggcgctcaagcagttctgaggttcttttccaccttattcaccctcctctgcaaaaatcccaggggctctcccacagggtgagcagcctgcctggggccaggaccacaggccaggcagggggtgcctcgggtctggctggcttcactatgctgtgctgggctctgggccagtgcaggacccagccaacacctcctcctcaccctccacaccaggcagtgggaagaagttgtgcccacctacctgcacatgcccttccgtcgggcatcagcgagtagccctgcccacagctgcaccggtagctgccctcagtgttaatacagtgcacgtcacacccaccattctggacccggcattcgttgatgtctgcaggatgcagggcagacaggggctggggctggggggaggggtccaggatggggagggggctggtttgggggtgggagcagagtggagttgaggtgaggacaggaggagctaccactatgtctgggactgtggttggtgcccaggggccagcaggtgggcacagtctcacccacgcagccctggcggtcaggtgtgctctggaagccggcatggcaggagcactggaaggcaccgatgacattgacacactggccatggggacacaggccatcactcagggagcactcatcgatgtctgtgggggagtgcaggtgaaagacgggcctgtgccccatctgccgtctgtgtgaccatgagacacactgggggcacacatgcatgctaaggagctcacactgccagcattggcacagccccgcatgtgcctatccgtacacttgcattcactcacatgcaaatacactcactctcctataagcacagacacccatatacacaccccacgtgcccgctcacacagactcacaaacacaccctggcacccactcacgtgtgaacacactcacccttgacagacacacacaggcacactcagatacacactcacactcaagtgcacactcctaaattcacaacacaccttatatccacttgcacacaaatacactcacccatgtgtaaatacacatccacacccaggggcacactcacacccatgtgcacacacagacacacaaacacccaatgcacactcacacatacacacacacccatgtgcacactcacacagacacacacataaacacaccctcaaacatacctgtccttgtgcaaacacatgtccacacccagacacccacacccagaggtacacccacacagacccactcaaacacattctcacacccactcacacacaaacacacctctataaacatgcatttgcatccaactacacatcacattctcttacacacacacacacagacttacgtacaaacacacccactcagaaattagccaggcatagtggcgcatgcctgtagtcccacctacttgggaggctgagatgggaggatcacctgagcccaggaggtggaggctgcagtgagctgtgattgtgccactgcaccccagcctggacaacagactgggaccctgtctcaaacaaaacaaaatgaaacacacctacgcacatgcaaacacacttgcccttggtagagacattcatagccaaatacacactcaaaccctcttgtgtgttcacacagacgcacacacacactcactcctcacatacaaacactcccccttgtacagacacacagtcacacaaatgcacaaacgcttgcccttgtacagacactcacacatgtgcgtgttcatctagacacacaaacacactcccgccatcttgcatataaacccacttacacacacagatacacacacacacttgcacgctcacacataggtatggcctcagaaagacagatacacatgcccaccctctcactcatccagcccacattcaccagacatccactcactttcacacacatgggctaacactcacacttgcacacccagatgcacacttaccctcacaggcagtgcccttggccgtcagctcatgcccagggggacactggcacttgtagctcccatccgtgttggtgcaagtgcctccccggcagagcagcgggtcccttgcacactcgtccacgtctgaaggtttgtgtggaaagagagagcaggcatgaaggtgctgatgcagggagggggtgatgaggctcatgctggcttctctccgccacctccccagcccccttcaccccagcgggagccaggagagcctggaggctccgggttgggatgacccaggggagtggggtctgcaccaggagcagagaccagccagatggggagggaggctgagattctcagaagaacaaaggccacgaagctgacactcttggggccactagaaacggcactaagaggccttcctccactccctgcaggacacgccagaaagctgaggctcagtcccgccaggactcagggcagggagcaggcagcctcgccatggcctcatcactcttcagccacagaggcatcatccttccatccctcaggcccaccccagggcctttgcacatgctgttctccagtgtcttcacccttttcacccccactccattctttctttctttccttttgttgttgttgtttttgagatggagtctcgctctgttgcccaagctggagtgcagtgacacgatctcggctcactgcaacctccgcctcctgggttcatgcaattctcctgcctcagcctcccaagtagctgggattacaggcatgcatcaccaagcccagctaatttttgtatttttagtagagacagcgtttcaccatgttggccaggctggtctcaaaatcctgacctcaagtgattcacctgcctcagcctcccaaattgccaggattacaggtatgagccaccgagcccagcctttttttttttttttttttttttttgagacagattttcacactgttacccagcctggagtgcagtgacacgatcacagctccctgcagcctccacctcctgtgttcaaactatcctcccacttcagcctcctgagtagctgggactacaggcaggcaccaccatgcccggctaatttttaaattttgtgtagagacggggcctctctatgttgaccaagctggtcttaaactcctggtctcaagcaatcctgtctcagccatctctcatcagatcatgtggcccttttaagggcttctgacagtggcaattttgcatttttttcttttcttttctttttctttctttctttcttttttttttttttttaatttggagacagaatctcgctctgtcgcccaggctggagtgcagtggcgcgatctcggctcactgcaacctccacctcctgggttcaagcaattctcctgcctcagcctcctgagtagctggacctacaggtgcacgccaccacacccagctaattttttgtattttaatagagacggggtttcaccatgttgcccaggctggtttcaaactcctgaactcaggcaatctgcccacctcagcctcccaaagtgctgggattacaggcatgagccaccatgcctggctttttcctcttccttccttccttccttccttttttctttagacagggtctcactctgtcacccaggctggagtgcaaaagtgcgattatggttcactgcagcctcaacctcctgggctcaagggatcctccctcctcagcctcccgagtagcacgcgccaccatgcctagctaatttttaaaaaactttatagtgacagggtcttgttatgttgcccaggctggcctcgaactcctggactcaagcaatcctactgcctcagcctctcaaaatgctgggattacaggcgagggccactgcacccagcccagttttgcatttcctcagcgattcatgttattcatgtctgtcttcctgttaggctgtgagctccaaggaaagagggctccctggagctagagctccctgcagtgcctctagctcagaggatgcatgtgaaatgctcatcaaatgaataacgaagtcaatgatggggacgagaggcctcataaccggcagtatttcccaggcttctctgagggtccctgtcctctacccaagctacacaccctccctgggagaccacaccccagtgtgccggccacccccaggtctcaggccccaggtctctctcctaaggacgaggcctcatggagcccagactcactgtacctcagctaatttacagctcctccctcctcctgccccctccatccacgtccacacagcaacagccgtccccaccctccctctcctcaatgccctccctgcccagggcgcccaccacacccctgcccggcagtcaccgacccatgcagttcttcatcagcatgaagccactctcgtagccgggaaaacactcgcactcaaagctgcccggcgtgttgacacaggtgccctggccgcagaggtcaggagagatgcgacactcgtcgatatctgtggggagagggggcagaggccggaggcgccatgtgggccgcatcatggggcacgaggcaggggggtccctgtcctttgatggaggtgtgggctagaggaagcccatctgcagacataaggaggcacaggccaagaggggaggcatgatgcaggcatgatggggtgccgtatggggtcatcgaatctgtagatatgacaggcagaacagaagcccccaaaaggagccgaggaaatggaggaaccccaaactaaacatgacaagggcaggcagttttctcacagacgggagttctccattttctttattttgatggtagatttgtttgtttgttttattttattttatttttattacttatttatttatttacttttttagagacagagtcttgctctgtcacccaggatggagtgcagtgatgcaatctcggctcactgcaacttctgcctcccaggatcaagcgattctcctgcctcagcctcccgagtagctgggattacaggtgtgtgccaccatgcccggctaattttgtatttttagtagagatggtgtttcgccatgttggccaggctggtctcaaactcctgacctaaagcagtccacccgccttggcctcccaaagtgctaggattataggtgtgagccactgagcctggcctgtttgtttttcactcaggctggagtgcagtggtgtgatcacagctcactgcagcctcaacctcccagggcctcaagggatccttctacctcagcctctcgaatagctgggactacagttaatgcaataataatttttttattttttgcagagatggaggtctcgctgtgttacccaggatagtctcaaactcttgggctcaagcaatcctcccaccttggcctccaaaagtgctgggatcacaggcgtgagccaccatgctggccctggaggcctctaaaggtcacctttgccagccccttcttttatgttttatttacttatttatttatatttgagacacagtctcgttctgtcacccaggctggagtgcaatggcacaatcttggcttactgcaacctccgcctcccgggttcaagtgattctcctgcctcggcctcccgagtagctgggattacaggcgcccgccaccaggcccagctaatttttgtatctttagtagagacggggtattgccatgttggccaggctggtctcgaactcttgacctcaagtgatccatctgccttggcctcccaaagtgctgggattacaggtgtgatccatcgcacctggcccagcgcccccttttttttttgagatggagtctctgtcgcccaggctggagtgcagtggcatgatctcagctcactgcaagctctgcatcccgggttcacgccattctcctgcctcagcctcccgagtagctgggactacaggtgcctgccaccacgctgggctaatttttgtatttttagtagagacagggtttcaccgtgttagccaggatggtctcgatctcctgacatcgtgatccgcccgcctcagcctcccaaagtgctgggattacaaatgtgagccaccgcgcccagcccagccccttcttttatagtcagggtccctgcagcccaaggagggcaatcacctgccctaggtcacacagcacagaggcagacacaagaagtgcccaaagaacaggtgttcgccaggcacagtggctcacacctgtaatcccagcactttgggaggccgaggtgggcggatcacctgaggtcgggagttcaagtccagcctgaccaacacggagaaacactatcactactgaaaaatacaaaattagccaggcatggtggcacatgcctgtaatcccagctacttaggaggctgaggcaggagagtcgcttgaacctgggaggcggaggttgcagtgagccgagatcgtgccattgcactccagcctggataacaagagtaaaactccgtctcgaaaaaaaaaagaagaagaaaaagaacaggtgttgtctctacgtcttatttgaggcccctatccctgccaaggatcacgctctctccaagaggcagaggtggcacctacctgtgcagttccgttcctgggcatccagggcgaagccccccgcacaggcgcagtggaagctgcccaccgtgtttctgcaggtaccgtgcgtgcagaggccagggaacaccttgcattcattcacatctgaagtacaggggcatcaaaccaccctgacgtccccaagctcaggatccatacaccaagccctccctgggttcttagtgcctcgccttacccacatccccttttcccccaaacacacttcccatctccaggcttttgcctatgccgtgcccctccccatccttccaggggcctgaccccttccccaaccgcacctttatagaatggtcggccagacaggaagtcccggctggcgaagcccagcccccgcgggcacaggctggcgaactccagagactcgggatccgggcaggcctcgcactcgactccccacacggccccgatggagcagcagcagacgtccatccggtacttgccaggcagggtgaccccacactcatcctcatcccatcgcaggaaacatggttccaatctcacatctgcacgggggacagtcactgcgtccccacccctgccacactgtgcccactgcgggacaggcgtgccgctcagtcactcccatcggaaactttctcccggacgtagtcaggtcgagggccagagtggaaaggggtgacttcctccaggcactgtctgggagggtactatgtgtactgttctgtagcactgttctaagcccctctatccatattttttttacgtgattgattcattggttgattgatttcttttgagacatagtcttgctctgtcactcaggctggagtgcagtggcacaatctcagctcaccataacctccacctcccaggttcaagcaattctccggcctcagcctcccgaggagctgggattacaggtgtgtgccaccacacccggctgacttttgttattttttagtagagactcggtttcaccacgttggccaggctgatctcgaactcaagtgatctgcccgcctcagcctcccaaagtgctgggattacaggtgtgagctaccgtgcctggccaatttttttttttttttttagacggagtcttgctctgtcccccaggctgtagtgcagcggcacaatctcagctcactgcaacctccgcctcccgggttcaagcgattctcctgcctcagcctcccgagtagctgggattacagacaccgctaccacgctcacctaatttttgtattttagtagagatggggtttcaccatgtttaccaggctggtcttgaactcctaacctcaagcaatccacctgcctcggcctcccaaagtgctggcattacaggcgtgagccaccatgcccggccactaaggatttttagggcagagaaactaccctgtatgacactacaatggtgaacatacgtcattatacgttcgtccaaacccatagaatgtccaatacaccaagggtaaaccctaaggtgctctatggacttagagatgacaatgctgtacccgtgcagtttcatccatcgtaacaaatgcaccttctaaccccagtgcaagatgttgagagttggggaggctgtacgtgtgtggaggtgggggctatgtgttcatatttgctgtgaacctaatactgtcctcaaagataaatcctggctggacttccagcactccgggatgctgaggtagggggatcccttgaggccaggagtttgagaccagcctaggcaagagagtgagaccctgtccctacaaaaatatatatagatataccaataaataaataaattagcgggtgtggtggtgcacacctgtagtcccagctgctcaggagatcaaggtacaaaaatcagttgaacccaggaagtgcaagttgtagtgagatgagattgcgccactgcactcctgcctgggtgacagagtgagaccctgtctcaagaaaaaagaaaaaaaaacccacccaaatgtctttcatgatatgttagccagaggcagaggatcccaaaggatgcctgaaatctctcctgttcaggccaggcgtggtggctcacgcctgtaatcccaacactttgggaggccgaggcgggcagatcacctgaggtcagaagttcgagaccatcctagccaacatggtgaaaccccatctctactaaaaatacaaaaattagctgggcgtggtggtatgtgcctgtaatcccagctactcaggaggctgaggcaggagaatcgcttgaacccgggaggcggaagttacagtgagccgagattgcgccactgcactccagcctgggcgacagagcgagactccatctcaaaaaaaaaaaaaaaaatctctcctgttcctcaagtcactgcgggtggagggaacaaaggaagaacgtgtggccctgtatgcggacctcgcctggactcacccacgcacagccggcctgaggcgtccagcatcaggccctctggacactcacagcggaaagacccagcagtgttgacgcaacgcccgttgggacagactcccgggaaggactcacactcgttcacatctgggtaaggaggagggaaagccggagggtccagggaggggaagggtgctggctggccattcccctggggtctcaagttgtccttgaggaggaaggaaggggacggggacacggggactggggactttcaagaaggcctggggaccaggtagggagaacgtctgtccccatcgcaaaagactccagggcggggccggaggtggcacccatgagggtggtgcgcctggttgtgtgcgggctctggagtagggggtgagctggacacgggcaggcagttaccatcgcaggtgacacccgtcatccgggcaaagccccgggcacaggcagggtctgcaactgggagaacaagagtgaagagaggagtcattttctcatgccagcccaaggggggacccgccccatggagggcttttcccatgggtgcctgggaggcctcaaggaggatactaccgatctcgcagcgttcgcaggggctcccccaggctgccccgagggtggcgcagcactcagaccgcaggctggctccctgaaggttcacctcacagcggctctcctggatcttcagccagcaggtgcccttggtgctgtctggggagaagaggcgggtcacctgtctcacctgccggccctacacctgcaccctgacccatagacgcccagcctctggaacgccgtcgggctccggggccgctcacctagacagaaggtaccagaggggtccagccggctgccagggccacatttgcaggtgtaggagccggccaggttccgacagacgccactcacacacgggctggacaggcattcgtcgacatctgtggggacagccccccaccaggtcctgagctgcaggaggagttgccttacctggccaggacccctcctccccaaggggccgccgcaaccggtggcacggggtgcacccagatgcacaagcatgcagagggcactggaatcaaatgtgcatgcaagcacatgtgtgtgctgagctgtgtgtgtacatgctgtaagagacaggaaatgccaaactgttttttttttgttttttttttttttttgagacagagtctcgctctgtcacccaggttggagtgcagtggcaccatcccggctcactgcaacctccgtctcccgggttcaagcgattctcgtgcctcagcctcccaagtagctgggactacaggcatgtgccaccatgcctggctaactttttttgtatttttagtagagacaggatttcatgatgttggccaggctggtctcaaactcccaacctcaggtggtccgcccgcctcagcctcccaaagtgctgggattataggcgtgagtcactgcacccagccaaaactgtattcttactctcaccttcaacacaacacagaatacatcagtgatcagacatggggttttttgtttgtttgcttttgccaagctgcccaattctccgacaccagcagggtgccctataattcaattctgacgctttctgcctggagttaaagtctgactccacaggttgagggctcagtcccacaagactgtcttccacaccagatgccagttgcaaatcggggcctccagaatttctgccttctcctcgggcttgatcatccgctagaggggctcacaggactcagggaaatacttaacttacgtttactagtttattataaaggatatcacaggctgggcgctgtggcttacgcctgtcatcccacctctttgggaggcagaggcgggtggatcactgaggtcaggagttcgagaccagcctggccaacacgatgaaacaccatctctattaaaaatacaaattagctgggcgtgatggcacacgcctgtagtccgggctacttgggaggcagagacaggataatctcttaaacggcgggagaattgcttgaacccaggaggtggaggttgcagtgagccgagatcgccccattgcactccagcctgggtgacagagcgagactctgtctcaaaaagataaaataaaaaaaataaaggatattacaaatgatgaacagccagatggaagagatgcacggtgcagggtatctgggaggagatgtggaacttccgtgcctgctctcggcatgccgccctgccagcacacagatatgtccatccacctagaagctctccaaactctgtagttcgagtaggacttctgggatgtgtgtataactgtgtgcccctgagtgtgtacaaccatgtgtgactgggactgcaagtgtgggaagtgtgagaatgagtgtatgggccaggtgtagtggctcgcgcctataatcccagcactttgggaggctgaagcaggtggatcacttgaggtcaggagttcgagaccagcctggcgaacatggtgaaaccctgtctctactaaaaatacaaaaattatctgggcttggtgacggacgcctgtaatcccagctacttgggaggctgaggcaggagaatcgcttgaactaggaggcagaggttgcagtgagctgagatcgtgccactgcactccagcctgggtgatagagcaagactctgtctcaaaaaaaaaaaaaaagaatacgtgtgtatgtaaatgtgagtatatatgtgtctttgagtgtgtatgtgtgaatgtaggtacatatgcaagtgtctttgagtatgcatgtctgtgtacacatgcacacagcatgtctgaatgtgtgtctgtgtatacacggcatgtgcagcgtgtctgggtgtatgtatgcatgacacatgcaacgtgcatgtctgagtgtggttgtgtacaggatgtttctgagcgtgtgcatgtgtgtcttgtgtacacacctcatgcaacatgtgagtatctgagcgtgtgcatatatgtgtgtgtgcacactacatatagcatgcgtgtgtgaatagaggtaacatgtaagcatctttgagcgtgtgcatgcctgtgcgtgcacacgccacatgccaagtatgttggagcatatgtgtgtgtgcaaacccacgtgagcccgggacccagtacctttgcagatctccgtgtcctgccagaagtggaagccgggggggcaggagcagctgtagctgccagggctattctggcaccacccgttgtcacacaggaggctgttgagggcacactcatccacgtctgtggggtgggggtgggagagaggggtgaggggtctgcagtgggagaggctgcccacacatccgcccgccaggtggcatgctcacctgtgcagtccttgcctgaggcacctgcctcataacccaggttgcagacacagcggtagctgccccgaaggttctcgcacacgccattggcacaaacctcaggatccagagcacactcgttgatgtctgcggcaggaggagggtgtgtcagcagcagcagaaggagggtgtgtccgaggcaggaggagggtgtgtcgcggcgcaccaggggtctctagaagtcagattccccaaggccatagctccagcccagacccggcctcattctgctctaaaccgaggtttctcagcctggacactgctgacatttggggccagatcattttttgctgtgaggggccatcccacgcattttaggatgtcgagcagctcccgtggcctccacccatgagatgtcagtagcacccaccgccccagtattactccagacattgtcaaatgacctcggtggggcaggggccaaattatctccagtttggaaatagtggagcagacatccatacagtggcactgtcataaaaataaaagcaattataggccagatatgatggctgtcacctataatcccaccactttgggaggctgaggtgggaggattgcttgagcccaggagtttgagaccagcctgggcaacatagcgagacccatgtctataaaaagcaatttttttttttttgagatagggtctcactctgtcgcacaggctggagtgcagtggtgcgatctcggctcactgcaacctccacctccctcgttcaagtgattctcatgactcagccccccaagtagctgggattacagccgcctgccaccacggctggctaatttttctatttttagtagagatggggtttcaccatgttggccaggctggtgtggaactcctgacctcaagtgatccacctccctcagcctcccaaagtgctggaattacaggcgtgagccaccgcatctggccataaagtaaatgttttaaaaattggctgggcatggcagctcgtgtctgtaatcacagcactttgggaggccaaggtgggtggatcacttgaggctagaagtttgagacaagcctgggcaacatggcaaaatctcatctctactaaaaaaaaaaaaatacaaaaattagccgggcatggagctgcatgcctgtaatcccagctatttgggaggctgaggcaggagaattgcttgaacccaggaggtggaggttgcagtgagccaagatcacgccactgcactccagcctgggtaacagagcaagactctgtcaaaaaaaaaagaaagaaagaaagaaaagaaagagaaagaaagagagagagagagagaaggaaagaaagaaagaatgaaagaaagaaagaaagaaagaaagaaagaaagaaagaaagaaagaaagaaagaaagaaaggaaaggaaaggaaaggaaaagaaaagaaaagaaaagaaaagaaaagaaaagaaaagaaaaggaagaaaaacaaatgagcaggtcatggtggtgagtgcctgtagtcccagctactcaggtggtatcacttgagcccaagaggtcgagtttgcagtgagccgtgattgcaccacatcactcgagcctgggcaatagagtgagatctcacctctaaaaaagggtggggggagttttggacacagacacgcatacagggagaacaccatgtgaagatggaggcagagatggggtgacgcctctatgagccaagaaatgccaaagattgctggagccaccaccagaagctggagagaggtccgggacagattctccctcaaagcctccaagggaaccagccctgcccgcaccttgatctccgacctctggcctgcaggagtgtgagagaatcagcttctgttgttgaagccgtctggtctggggcactttgttacgggaaccccgggccaactcctacagcctcccaccacagctctccccacatctggtaggggcaggctggctgctgtttggaggggctgggctccacttacctcgaccatccgtggtaatgccaagcccactgctgcacagtgcctggaactcagctggggatggagggacagagtgagacgggtcagggagcttagccatggctcggattcagccacaggcaaggatgaggccctctggtcttgggcaagagtttgggactaagacacaactccaaccccggggagggagcaactcccttcagcctctttttgggaagagcccccactccatggcagccatgaccccccaccagaagcgagaaccgatggaggcattcagaccaaggaggcgatggggaccgggcagccggatgctcaccggagtctttggcaggacaaagctggcagggctccccaaaaccgtggtccggattggcacagcagcactcggacttggtgacagtgccagggaaggggcgggcacaggagcccttctcgatggccccatagcaggtgctgcgcacgtgggtgtccacgcacacgcggccatccgtgcctaccgccagcccccccaggcactggcagcggaaggagccctcggtgttggtacagtggccgttcacgcagatgccgggcgtctggcactcgtcaatgtctgcagaagcagtggcggcacggggatgggttccagcgtgctcccttcctctctcccctccccatctcccaacatttccatcttcccagccattctatttctttcctttccagtttcttgtctttccagtttcctgttgtctgtgtctctgtcctctcctcctcttgtctccttcctcttctcctctcccattattccccatctttctatctttctctccacctttaaacaaattttttaaacgcagggtctgacttccagactggagtgcagtggcgtgatcatagctcactgcggcctccaactccagggctcaagtgatcctgctgcctcagcctcccgagtaggagggactacaggggttcatctccatgttcggctaatttttaaaaattttttatagagacggagtctcatcatgttgcccaggctggtctcaaactcctgagctcaagtgatccttctgcctcagccttccaaagtgctgggattacaggtgcatgctaccatgcccagctaattttttttttaggtagaaatggcgtctgactatgttgctcaggctggtctcgaactcctgtcctcaagtgatcctctaacctcagcctcccaaagtgctgggatcacagatgaacctggcccctccccaccttataatgcatcactttttttttcttctgagacggagtctcactcttgtcacccaggctggagtgcaatggcgcgatctcggctcactgcaacctctacctcccaggatcaagtaattctcctgcctcagcctcccaagtagctgggattacaggtgcccaccaccatacctggctaatttttgtatttttagtagagatggggtttcaccattttggccaggctggtcttgaactcctgacctcaaatgatccatctgcctcggcctcccaaggtgctgggactacaggcgtgagccacggcacctgcctcttcttttcttccttttcttcttcttcgcttctccccttttccctcctcctcctctttttctccctgccccttctcttctccttctctcatgctcgtcccatccccgtccggtccctctcctcttcctcgccgtccctctgcttccccatctcccttctcccctccgctggccagtctggctccaggctcacccatgcagtagtggccgccaggcgccagcaggaagccgggtttgcagaggcaggagaagctgccatcctcgttgagacacacgccgttgacgcacatggtgctggtggcacactcgttgtggtctggggacaacagcagaggctgggtccaggcagggaccacactgggaccctctctctccctcctccaggctccagggctgaccccccaggatccctccctggagtgtgggaggcaaacaagctgtggttgtctgtgactgtgtgagcttgtatattagtccgtccgctgggacgttgagttccccggggcacgacccctgtcttactcaggctgcaatacagtaggtgctgcataaataattgctcaaagctgaataaacgtggtggtttttgcacaacattggaaatttattaaatatcagtgaattgttcattttaaaatgtttaaatattttttaaaagacaacaatttttttttttttgagacagagtctcgctctgtcgcccaggctggagcacagtggtgtgatctcagctccctgcaacctccgcctcgcgggttcaagcgattctcctgcttcagcctcctgagtagctgggattacaggcatgtaccaccacgcccggctaattgtttttgtatttttagtagagacggggtttcaccatgttggccaggctagtcttgaactcctgacctcgtgataagcccgcctcgtcctcccaaagtgctgggattacaggcgtgagccaccgcgcccaacctcttgttcacttttaaatgattaaatttaggttgtgtgaatcttacttcaatttcataaaaaggaaatggaaataaagttagtaagaccatggtctaatttaatggaaggtggcaggggcagaaatgagttgttttccaaaatgtcagttttaaacaataaaggactgaacatacatttaaaaaaaaaaatgtggctgggtgcggtggttcacgcccgtaatcccagcactttgggaggccgagatgggcagatcacgaggtcaggagatcgagaccatcctggctaacatggtgaaaccccatctctactaaaaatacaaaaaaaaaaagaaaaaaaaaatcagccgggcgtggtggtgggtgcctgtggtcccagttactcgggaggctgaggcaggggaatgatgtgaacccgggaggtggaggttgcagtgagccaggatcacgccactgcactccagcctgggtgacagagtgagactccatctcaaaataaataaataaataaaataaataaatgcatgaaatgccaccacaaaaatatgcacatgagcattcacagaagcattatgcctaacagcaaaaagtgaaaacgaaccagtgtcctactgaatggatcgacacactgtggtctattcatgtaatggaacattattcggccatgaaaaagaatgaagaagccaggtatgctggctcatgcctgtagtcccagctactcaagtggctgaggcggggacattgcttgagccccccagggcccctccctggggtgtgggaggcaaagaagctgtggttgtctgtggctgtgtttgcttgcatattagtctgtctgctgggatatgagttaaagtccagcctaggcaacacagtgagacccaatcacaaaaaaataaatacatggccgggcgcaatggctcacgcctgtaatctcagcactttgggaggccaaggcgggcggatcacctgaggtcaggagttcgagaccagcctggccaacatggtgaaaccccatctctactaaaaatacaaacgttagccgggcacagtggcgcacacctgtaatcccagctactcaggaggctgaggcaggagaatcacttgaacccgggcagcagaggttgcagtgagccaagatggcaccactgcactccagcctgggagatagagactcaaaatgaataaatgaataaatatataaataaatataaatatatatattttacatatatatatatatattttttgaaacaaggtctaggtctgtcacctaggctagagtgcagtgatgcaatcacagctcactgcagccccgaactcctgggctcaagtgatcctcctgcctcagcctcctgagtagctgggactacaggcacctgccaccatgccaggctaatttttgggttttctgtagagacagggtcttgctgtgttgctcaggctgatcttgaactcctggcctcaagcgatcctcctgccttccaaagtactgggattacagttgtgagccaccaagcttggcataaaaaaaaatttttttttttttgagactgagtctctctctgtcacccacactggagagcagtggtgtgatcttggctcattgcagcctccgtctcctgggttcaggcaattctcctgcctcagcctcccgagtagctgggattacaggtgtctgccaccacgcccagctaatttttttgtatttagtagagatggggtttcaccgtgttggtcaggctggtctcgaactcctgacctcggcctcccaaagtgctgggattacaggcgtgatccactacactcggacttctttttttttttaggagatggagtctcgctctatcagccaggctggagtgcaggggcacgatcacagctcactgcagcctcaaccttttcagctcaagagattctcctgcctcagccccgcaaagtgctgggattacaggcataaggcaccaagactggctccaaaaggtccttttttgtgattcacggaataaattcaggaaggaggaaatgaaggggagagtcagggtggtcaggggataagaagagtctcaggtgggctgctgggttcagaggtgagcagaggagacgtcgtagggagggaggtgggtttgggggcacagtgaagatttgaggtggctgtaaaaggcagctagtggggcccggaagcccctgcccacccgcccacccccaactcacccacacagttcttgccgtcagggctgagctcgaagcctgcattgcagacacactggaagctgccctctgtgttgacacagcggcccaggtgacaaaggccaccactgacaatgcactcgtccacatctgcggggaaggcaggcgggcagtcaagaggtgctccccaccctccaagcctgggccagaacccccaacaacatcacccctactcttggatggacagccgtacccacgcatgcctgcctggtgggcgtggcctggaagcccgggtagcaccggcagtggtaggtgccggggatgttgacgcagtcaccgtggtggcaggggctgctggtgcattcgtctacatctgaggggagaggaccctgagccctagcacgagcagggcagtgagaaccgcccccccttccacctggccgcggctcaccaatgcactcgccgcgcacgtcctgggtgtagcccacgttacactcgcagcggtagctggaaggcgtgggcaggcagcggccattcagacacaggttggtgaagtgtcggcagatgtcaatggtctggttcagggtagcagtgcctacgggtggggccggcagaggcatctgagcagtggctggccccgccccagtctggagcctgggcttcacctctctaggcccagataccccctctaaggctgggaccctgccctggctcagatcctgccctctttctcatggagagtcctgccttagattcagaactccaacctgggatctagatccctccaacctgggacctagatccctccaacctgggcctggatccctccaacctggggcctggatccctccaacctgggcctggatccctccaacctggggtctagatacctccaacctggggcctggatccctccaacctgggacctggatccctccaacctgggcctggatccctccaacctggggcctggatccctccaacctgggcctggatccctccaacctggggtctagatacctccaacctggggcctggatccctccaacctggggcctggatccctccaacctgaagcctagatccctccaaactggcacctcgatcccttcaacctgggacctggatccctccaacctggggcctagatctctccaacctggtgcctagatccctccaacctggaacccagattcctccaacctggtgcctagatccctccaacctggaacccagattcctccaacctggggtctagatccctccaacctggggcctagatatctccaacctggggcttagatcccaccaacctgaagcctagatccctccaacctgggacctggatccctccaacctgggccctagatccctccaacctggggccttagatccctccaacctggggccttagatccctccaacctggagcctagatccctccaacctggagcctagatccctccaacctggggcctagatccctccaaaatggagccttagatcccttcaatctggagcctagatccctctaacctggtcccagagatgcccagactcccactctgggcccaaatcctcattatggggcaagaacccaccccaggcctaaatcctacatgacagacccccacaccaggcccaaactccccacccaaagcccgaactctgacttatttatttatttatttatttatttatttatttttagagacagggtctcactctgtcacccaggttggagggcagtgacacaatcacagctcactgcagcttccaactcctgggctccagcaatcctcctgcctcttcctcctgagtggcagggactactggtgggcatcaccacacctagctaattttcaatttgctgtagagacagggtcttgctatgtcacccaggctggtctcgaactcctggcctcaagtgatccttccacctcggcctcccaaagtactgggattataggcatgagtcgctgtgtccagcccaaaacctaactctgaggaccagattctccagttacctccatccccatccactactagcactgtcatccctactagccaggccaggagttccccctccaaagccctaaccctctctctgaggcctggacaccgtcccctgtttggagctctctccccagatccaggaccatccttcaagtcttggaatgttcctcccaagccccaggcctcaccaatattagagttgccagggcccaggctggggatcccacgcgcatcagagccatgggggttgagtcgcgctggcccaagagggggacccatgccattggatccgaagcccaggaggccagggaagaggccagggtggccgggtagcagcggcagccgctgggcgcacagttgctggaattcatctgcaaggaagcagggttgaggccaggcccttggccctcccctgtcccctcctcacccacagccctgcaggctgcagctcttactcactggagccccgaggaggacacagctcagggaccgggccagctgcccagcacctgcccctgtcacagcagcactgcctgcgagtgtagtggccggcgaggtctccagcacagcggcccccgaaaagcactgagaagcaggcgccggcccggtagtctgcaaaagatcagagggtgagcccatgagcacaggacatcagtgaccagacctggatccaaattccagctgtagcagcactgcctgtaggacgggtctgtttgccgctctgtgcctcagtttcctctccataaaatggggatgcttggagcatccacctcacccgggaaaagtattacctggatgaaaagtctgacatagtccagatgcagtagctcacacctgtaatcccagcactttgggaggctggggcgggaggatctcttaaggtcaggagtgcaagaccagcctgaccaacatggcgaaacctcatgtctactaaaaatacaaaaattagccaagggtggtggcaggcacttgtaatcacagctacttgggaggctgaggcaggagaatcactaattgcttgaacccaggagacaaagattgcagtgagctgagatcatgccactgcactccggcctgggcaacagagcgagactccgtctcaaaaaaaataaagggccgggcgcagtggctcacgcctgtaatctcagcactttgggaggctgaggcgggtagatcatgaggtcaggagttcaagaagagcctggccaacatgacgaaacccagtctctactaaaaatacaaaaattagccgggtgcggtggcgcacacctgtaatcccagctacttgggaggctgaggcaggagaatcacttcaacctgggaggcagaggttgtagtgagccaagattgtgccactgcactccagcctgggccacagaccaagattccgcctcaaaaataaataaataaataaatagaaaagtttgacatatggccaatgctcgctcagtgccatctcttgttaccaagattccaagttatcgcacagaggtagtgagctccccgtcgctgcaggcatccaaccacactaaggaagacccattggcggggaaggactaccccagtgggataccaggcagggacacggagatctgcagctgtgtgtctttgcttgctggcttcaggcattatgcagaagcctacgagactgtgaatttcagagaggggccccaaggagtcgaggggtggattgacggctacagcccccggggtgactgaggcagacaggctccccaggtatgagaaccaccaacactcttccacttcccactgcgccctcaaggtcaatggctttatgcagcgatcagatttctcaggctctggcttaaagagcatatttttaggcttaaaaatgcacaaaccttggctggtggcccacagtttaaaaaactcctcccagcagctgggagggccactgagagccacccctgacctgccccgagctgggaaaacatgcaaatgtttctacctccctggtcccctccccttgcacctgggggccccccaggtacgtgcgtgggagtcagggtttttcgttctcagccttatcatagcccctcaaaggggactgggcctgcccagacgaggagagatcaacagactcctccaaagtcacacagctgcaaaagcaagaggaggacgggaaactcgatttcccaatctcaggggacccaacaggcaacagtccctcaagcaagagagacagaatataagaatttcaacaaaaatgctcagccacagtggctcatgcctgtaatcccagcactttgggaggctgaggcgggtggatcacctgaggtcaagagtttgagaccagcctggccaacacagtgaaaccccgtctctactaaaaatgcaaaaattagccgggcatggtggtgggtgcctgtaatcccagctactggggaggctgaggcaggagaatcacttgaaccccggaggcggaggttgcagtgagccgagatcgtgccattgcactccagcctgggggacagagtaagaatgtgttaaaagaattttaacaaaaatgatcctgtcattgctgtaagtacatactgtgagctaagtggccacagccccaacattacctggtgtccatgaatgtgtattaagtatcctctaggtaccagccctctgcaaattactccccaaatgatatcttactcaatcttcattgagctaggtactgctattatctaccattttacagatggggaaactgaggcacagagcggttaagtcacttgcccaaggccacagggtctgtgagcagctctgggtgggagccccagactgattccaaagcctatgttcagaggctggtttgtccaatccaaggactggtctttagcagctgagagaggaccccccgcagtccaggggatgtatccacagctacccccaatgccagctgtgatggcccccagtggtggagacctagaaagtctggagttggccagccgggcgcggtggctcacgcctgtaatcccagcactttgggaggccgaggcgggcggatcacgaggtcaggagatcgagaccatcctggctaacacggtgaaaccccgtctctactaaaaaaatacaaaaaaattatccgggcgtggtagcgggcgcctgtagtcccagctactcgggaggctgaggcaggggaatggcgtgaacccaggaggcggagcttgcagtgagccgagatcgcgccactgcactccagcctgggcgacagagcgagactccgtctcaaaaaaaaaaaaaaaaaaaaaaattagctaggcgtggtggcgtgcgcctgtactcccagctacttgggaggctgaggcaggaggatctcttgaactgggaggcagaggttgcagtgagctgagatcacaccactgcactccagcctgggtaacagagtgagactctgtctcaaaaaaaaaaaaaaaaaaaagagagagacagacagctgaacaaggggtctctctcctacccactctctcccgctccagcccctcggttcactcaggcagtgggtgccatccaggctgctggcaaaaccttgggaacaggtgcacacgtagctcccgacagtgttggtgcagtcacccccagaacagaggccggacaggctgagacactcattcacatctacataaacagggacaaggtcagaactgggcacctcaccagcctgacccctctgccttcctgcaggggagcctgagccccccaggtcatgagtcacagaggaggtctcaggttgtccccctccagtcacccaccttcacatgcggcgctgctgtcactgagccggtgtccaactggacagcggcaatggaaggagcccaccatgttgacgcagctgcctccctggcacaggcctggcacagcctggcactcatccacatctgcaaggacaaagcccggcaggggagtgagaggcccatcggagggaagaaccaaggcagctaaggcctcccactcagccctgaccccactattcaccttggcaggcccccgtgtggatattggggatgaagccgcggcggcaggggtgtggctgtgcagggcaaagttcacatggaaggccccaggcacggcccacagtggcacagcaaagtgccttggtgcacacgaggcccgtcagctgatgctggcacccctcggggcctacttggccaaagcagggtcccgtccggtaatctgcagggcagacagatgtgggtacctggctgagggctgcccctgtctggagatctctgcgtctctaacaccttctcagcggcccctgcacccacagaccaggctttacttatgctgctcccttactaaatagaatatctttcctcccctttccctacctaacgaactcctattcacccttcaaaaccctttttcttcaaagcatttcctgaccaacttccaagagaccagcacctccaagccaataaagctcagggcctgtgtgaacaccctgtctgaactgatgggactccttccccaggcctatcctcccttcaggcctgggcagggacccacggatgcccagctaaaaagcatgtctagtccttgagcacacgcctggccctgccatatcgcccagatttggggaaggatctgttatctgcctaaattctctggacccccaacatcacatccccaatccccatcaggcccagcccaaggtgaccgcattggttcccccaaccccagtacatgagcccagatgtgacttcttggctctcttctcccagatgtttccaataaaggagttagctctcaaacaagggcagccgctcccaagagaagaagccaaactcacccccaactcaggccccgtaaggaggaggggcttcacagagacccccaccccccagctgtcctgatgccccaagccaaaacgtaattcctggcagctcccccactccccctccccctcactcttctgccacccagagcttggcccgcctccaacaagcccatgttctaattctgcagtttccagaagcccaccctcaaacccaggtcacttccccagcccctccagcttctagtccccgggtcgtgcccatcctcaccttcctgggctgaaacaccacattaggcacccagatgcctctgcatctgaaaatctcacaagcctggatgtccctgacgccacccactccggttctctttctctttctcagcctcctgtgggctcggttttttctgtccaggcttaaatgcccaggtggctgtctctgctggcccttccttctctcacggggatcctcagcggcaccctgggcttcagtccccatggatggggcagcccacgccgccatctcagccccaggcctgagtgtccagctgcttcccagacaacttgcaagtccctcggccaacactgagctcagagtcctcctcctccctgccagggtgcgccactaccttccctccagttttcaccaggtcttgggttcatcctgactccctccttcttctctccccgtccctgccacacctcactgctcacaagaaagacatcactgtgtccgttctccttttttcttttcttttctttttttttttttttttgagacagggtttcgctctgtcttccaggctggagtacagtggtgcgatcttggctcactgcctcccaggttcaaaaaattctcatgcctcagccttccaagtagctgggactacaggcacgcgctaccacacccagttacatttttttgtgtatttttagtagagatggcttttgccatgttggccatggctggtctcaaactcctggcctcgagtgatctgcccgcctcggcctcccaaaatgctagaattgcaggcatgagccacagtgcctggcctcttttctttctttctttctttctttcttttttttttttaagagacagagggtctggttctgtcacccaggctggaatgcagtggcaccaccacggctcactgcagccttgaactcctgggctcatgcaatcctcccacttcagcctgagactacagatatgcaccaccatgccaggctaattttttactttttttagagagggggggtgtctcactatgctacccaggttgatctcaaactcctggtacatccaccctcttaattttggtaacaacctctcagcaggtgaccccacctatcttagccgtcttaaaaatgggatcatttttaagagttagggtgactgggtgtggtggctcattttgggaggctgagacaggcagatcacttgaggccaggagttcgaggccagcctggccaacatggcaaaacctcatctctactaaaattacaaaaattagctgagcgtggggatgcctgtaatcccagctactcgggaggctgaagcgggaggattggttgaacctgggaggcagaggttgcagtgagccgagatcatatcactgcactctagcccgaaagagcaaaactttgtctcaaaaaaaaaagagagaattagggtgcaataaagagggggtttgcccatctcatgaagtccagtccaccctaccagatccagctgaggggtcccctcctccaggaagccctccctgactcccttccatggagcagatggtttctctgtccttcacatgctccagggctgccccaacccttgtcttagccttgacacccccagataagaatcttctgcttgcagtttcttctccctgcccctcagactggcacatcctctctctttcctaccagactccaacacaggtgctcgctcagagccagtgaatagcagatgttttggagaacagatgagcaaatgaaagaaatgtcctcagactgccccaaatgcgggaaggaggccagctggttcctttcaaggcctggccatgtctcagggacttccaggaaaccccctttcctccatcgagtcccctgtctacctcccacccgcgcatgcttggtacctctctcacattgaggtcccatgaagccatacacacaggcgcagcggttgggcccaatgcagcgacccccattgtggcagccgcggtcacagatggctgtggaggagagagggtgatggctggaggtcccccagcagcagagagagctggggttcacagcaagcctgtcttcacccaggaatccccaggatctggcccaggttgaataagactgaggctgagctgagtggctagcgcctgtaatccgagcgctttgggaggccaaggcaggtggatcacctgaggtcaggggttcgagaccagcctgtccaatatagtgaaaccccatctttactaaaaatacaaaaattagccaggcatggtggccggctcttttaatcccagctactcaggaggctgacacagaagaattgttcaaacctgggaggcggaggttgcagtgagctgagatggtgccactgcattccagcctgggcaacagagcaaaactccatctcaaaaaaaaaaaaaaaaaaaaaaaagggccgggcacggtagctcacgcctgtaatcccagcactttgggaggctgaggcgggcggatcacgaggtcaggagatcaagaccatcctggctaacacagtgaaaccccatctctactaaaaatacaaaaaaattagtcaggcaaggtggcgggcacctgtagtcccagctactcgggaggctgaggcaggagaatggcgtgaacctgggaggcggagcttgcagtaagccgagatcttgccactgcactccagcctgagtgacacagcgagactctgtctcaaaaaaaaaaaaaaaaaaaagagactgtggcaataaacgtcccctgcaatctccagtccaggaagaaggaaccctgggcagtgggcaggtggcagcagagactaatactctgggatcacagtcccaggtgtgcaaagaggggagtcccatggggatactcacgctgcccacacacggtgcctgtgtagcccttctgacacagacaggacgccccccggcaggtgcccccattcatacagctcacactgcaccctgaccctggggacaggaaggcaggacgcatagtaatgtggagatgggccccgagatgccctcctaggaaggctgcaggactaggcatgctcagccccgctcctgtccttcaacaaaagcagcccaggctcctcgtggcaaccagaaccctgtgaacttcttctccctcccgcaagaggccgcttcccgctcacctcggctcaccccgcagctgggagccagcgtcccatccgcacaggtgcacaggttgggctgggagcagaagccttcaccgcaggcgcgcctacagatggctggatgagtgcagcgggtggcagtcaagaccaggaccgagcctgggccgtccctgctccattggtgtccgggctggccggaacacctcagtggacgctgctggtcatctgcatccccggctctgctcatagcacaccccacccctgttttcatgggatgtccccccactctcgggctgggctgggcagggtgtgtgacccaggctgtgggttggggactctgctagagccatggggagagaatgctctttgggccagagctgctgagctgtgaggacagagctggaggtgctggggtcctggatactgaggttgggtgtctcctgggaagtggagtcagattccagagacagaaacagaaagagagggtgaggccagagagagacaaacagagagagactcagagaaacagagagagagagaatcagttagatagagagacagtaaccaacagagagaggccaggtgcagtggctcacacctggaatcctagcactttgggaggctgagatgggaaaatcgcttgaggccagagtttgagaccagcctgagcaacacagagacccccatctctaaaaataataataataaagaaaagaaaccaacagagagagacatgagcagagatgaatagagagaggcagagacaaagcaagggaaccagagagacagacagacacaaggaggttgtagggcaaaggaaatgaacatggcaggttggcctggaaccctgaggacagacgcagatgcaagggccattcctgtggttcagccagaggtccctggctaagtccccgtgtaaacagagctgaacctgcaggcaggtaagagtgtccccggcctgtgcccccccacctccagacggcggtagcactcacgtacgacacactggctcctgccagggaatgtcctccagcctggacagcagtaggcatggaaccgggagccgcacacattcggccttcggggacagcgagatgggtctggtgagcccctgcccgtgtggacatccccccgggtattccgctggccccaggacagcccaatccacaccgaaggggtctcccagcatcccaggtaccacgcacccctgcaagatgcctgggctgccccgcctccgcacacgtccaggacctgcagcctccaaggccccgtcccagcggccttggccacctgccatgcacaacagggccgaccaggccagcaggagccgggccagggggccccttgccaaatacagaccctccagagtcatggcgtgtcccctggaggctgcggagaggaagcagagtcagccctagatgagccccccaccctagccatgggggacccaacacaacgaggagggcagggtggttgccaaatggggcagccccggggcctctgggagcccaaggaggcatccagccccaaccgggaagcggtgaacagtcagaggaggcttcctggaggaggtgtgatgttagagaagggtcttggggctgagggtgcacagccaaggcaagacgggagtgggaagtggaagggaggggagagagggccaggtggggccaggtggggccaggcgttgcaggagtgggcatagcagtgtcatgcagcttttgctcattcgtcaaggacaatgaagagcccttgaaaagctttgagtgggaggagcaaggtcagaaatgcatgttaggtggtgtggggaagggcagcagggtcccgggggggaaacagggtgtcagaaggctgggggctgtccagatgggagagagaggagaggaatgggaggctcatgtcgtgggaggtggagggcattgaggagattcccaaagttctagctgggacggtggagcccagagagcgtccagggtaggaggaagatggtaagtcgtggaaggcaacaaccccactgtccctctgtgacacagatacccccactcctgcaatgcctggccccacctggccctgtgtcccctcgcctccacatcccacgccggtcttgcctgggctgtgcacccttagccgcaagacccttttctaacatcacacctcctccaggaagcctcctctgactgttcactgctcccaggtcagggctggatgcctccctgggcagggggcccaggcaggggctggaacttcccaatgcagagagtaaccctgtgcccagcagggaagggaccgcttctgtgcccatttcacagatgcacaaactaaggccatcacaccatgagtgaggggctaagccggagcttaagcccacgaagagaagaaggaggggaagaagatcaggaacggaactcgctcctgccccccttggctgggtctttcctgggccatgaaggacgggagggagaagaccgggacaggagacgaccgtttggagggtggaggcaaaatacttgagggagagaagccagaccaagtggccttcctgttccattcaggttccagggaggaaaggaaccggccctaggtggagaatgggcggggagccctgctgtgtggtcttggccacgcccctctctgggccaacctggttgtccaaaggccccggagaagggagagacccctgtcaacgttggagggttggctggctggagaggggcgccctctttttcttctcagttgtccgggtcagtccgcactctgaggctccgtggactccaagcagcctcggggcttgcaagccctcctcccccactccctccgccccagccccctgcctcgggtcgggtgggggaattaggtggggggagtctctggcctgatttgcctcggtcccccctacacaccgctgcttctgcgagccacaccctggagtttgtggaatgaatgagcagagaaggcgcgcccggcacggggtgtggaggctgagggccaaacagcgagggataccaagcttcgccgacggggagggggcgcccccggagcccgcggggcgcgatctccacccggcagggcccccggccgcgaccacgcttggctccgccctcacctgtggggtcaggggccccgcgccccggccgagcccctcccgccgggtccccgcgcccccactccccactgcggcgggcgccactagaaggcggagaggggagggggctgggcccggggctgcccggctgcgaacaaaggaatcctctccccctccccctgccggcccccccgcccccgccttctccacccttcagcgcccgcgatctcgccccgccgctggccccgcgccttcacctacctgcgaggcggcgcgcgtggaggcgggcacggcaggcggacgcgcgggactcagcgctgcagggcgggctcctgcggcgccggggacccggggcgggaacgcaaagccgagaggccgaccccgccgcgttcccagcccagagctgccactcgggggggagttgggggcgggaggagttggaggagggcgcgtttgcacctcttagctcccggggcggggacggggggctccgatccggggcggggagagaggctgcggctcgggggagggtccggggctccgagtgaaaaactccgatggactggagggatgtgagggcgggctgggggcgcctagtaggggctgccggggccgcgttttcggatcgagactaaggtggaggtggggctctgacttttggagggcctggacgacagcctgggcagagaagtcccgggactcacctgggcggccctctcagggcctcccaagccgccaccccctccctcgagcaaggagaattgcgagagtgacgttggaaactcacctggctcttggagcctggattcttaactaggctgagatcaggggcccctaaatatgttgacaaaacattgggcaaagctgtatttcccagggagaagggcccaggtttttcatctggttctcaaaatgaagaggttaacaattcaaacggtgtaaactttcaaatctctttgaacctgtttgtccacctaccaaagggaccagacaagaattttggctccctatctgttgtcagtactccaaacaaaaatttctaggcttttccactaccttcatacctttgagaatagacccttaacatggggatctgtcagaagctgtgcgttgggcctgaagctgttactccatccagcaaactcctacgcatctgtcaaagtccagttcaaaaattccctccctatccgcaaattgtgagtttactctattgaactcccaaagctgattgtgctgaatatccccccaccacagtacttccggaatctaataaataagtaagcccagtgggcttgaaaccaggagttcgagactaacctgggtaacatagtgagaccccatctctaaaaaaaaaaaaaaaaaaaaaattaaaaagaattagccaggcctggtggcatgcatctatagtcccagctactcaggaggctgaggcaggaggactgcttcagcctaggaggttgaggctgcagtgagttatgattgtgccactgcactccagcctgggcaactgagcaagaccctatctccaaaaattggagaccctgtctccattccggaagtgctatggtgggagtatattcagcaagtcagctttgggagttcaatagggtaaactcacaatttgcagggagggagaggattttgtttatgttttgttttgtttgttttttgagacaaagtcttgccctgtcacccaggctggagtgcaatggcacgatcttggctcactacaacctccacctcccaggttcaagcaattctcctgcttcagccttccgagtagctgggattacgggcttgtgccatcatgcccggtaaattttttgtatctttagtagagacggggattcaccatgttggccaggctggtctcgaactcctaacatcgtgatccacctgcctcggcctcccaaagtgctgagattacaggcgtgagccaccgagtctggcccagaaggggatttttgaagtaggttttgacagttgcataggagtttgctggaggaaacagaacaggcaaaggcctggagaaggagagaacttagaacaaacatgcctggatggagtgaggttggaactttaggagagaggagaaggggagggagcaagaggaaagcaggaaacataagaagaggctagaagcaccgaggagccctcagcaggctccccccccacctctgaggggagacacggtggactcacagaaaggggaggttctcccaaggctccacttccaggtcttagactgtgtccggggagcattgagggccccagggctgggctcggggagcatgggacagacgccgacttcagggacaagatccagtcatcctggccaagggaggggcccgtggaccctgtgagaagggtcaggtggggtgctggggcatggggagggtggactggggagggaaccccaggatggaggtggcccagcagagacaggggggtggggttcctgttggagggtgggcccaggggctattgtggacaaaccagtttccccggccaccttggacacctctttccaggctcctctgccaaggtccacccagatttgttctgcaacaaatgaatcttacatgggcacggggacaagcaccgggtgccctagaagcagcccagcataggtgcaaaaggtggggagagattgtcccatcccagggacactgcacagccactgttgccatggctaagtctggaggagggctttcctggaagaactgtgggccagggagcgactcagtcctagaagtctccctacctgccctccagaagagaggggagaaggaagccggagggtgtggcaagaccaggatgtggagctgttggaagtcaccgcaactgaagtgctcgaaaacggcagatagtgggcattggttgttcacagcccccaacccaagctactgtccacaccgcgtgctgtagtttcagacttcccatggtgccaccctggtctgttatgttattgccagttattgatgtggtatcacagacagtgtcaccccccactgtacccttattacatcacactgttaagaagggacatttaggctgggcatggtggctcacgcctgtaatcccaacgctttgggaggccgagttgggcatatcacgaggtcaggagatcaagaccatcctggctaacacagtgaaaccccatctctactaaaaatataaaaaattgctgggcgcggtgggtcacacctgtaatcccagcactttgggaggctgaggcgggcggatcacgagctcaggagatcaaaaccatcctggctaacatggtgaaaccccgtctctactaaaaatacaaaaaattagctgggcatggtggtgggcgcctgcagttccagctactcgggaggctgaggcaggagaatggtgtgaacccgggaggcagagcttgcagtgagccgagatggtgccactgcactccagtatgggcgacagagcgagactccatctcaaaaaaaaaataaataaaataaaaataaataaaaaaattagccaggcacgggggcacacacctgtagttccaggtacttgggaggctgaggcaggagaatcgcttgaacctgggaggcagaggctgcaatgagccaagatcacgccactgcgctctagcctaggcgacagagcgagactccatctcaaaaaaaaaaaaagaagggacatttaggctttaaatcctaccgcatatcacagtccccccacccaggactgtacaaaacacatgcatggtctctccgtcaaaactgcatcatcagccaggcgctgtgcctcacgcctgtaatgtcaacactttgggaagccaaggtggaggatcctttgaggccaagagttcaaggcaagcctgggcaacatagcaagaccccatctctacaaaaaaatagaaaaattagctgggcatggtggcatgtacctgtagtcccagctacttgggaggctgaggtgggaggagtgcttgaacccaggagtttgaggctgcagtgagctatgatgttgccactggactccagcctggataacagatcatgaacctgtctctaaatatgtatgtatatcatcatcatcaccatgttcctattctacagtcacttgtccctatgaccctgtctcattgtcacctgtccatgtgacaccctgctcttttctggttgctccgctacctgggacatgcatgtctcctgtcacctttacaccttcacctttctgctgtgacacagtccccggctcatggtcataccattacccagaatgtcagggttcttaacatcacaattcactggcatcagcaacaaccgggctcagcagaaagagtgaccaagcgtggtggtgccgcagccaaccacattcacacacatcacatgcagatcgggccccaggaagacaccattcattaccatctggcaccctaagccctgatgctgctcagtgatccgagatgctggcaccagttccccccaccctcagtaaaatgaggtccatgggggctccaatggggatctggtgttttaaagtttttgtttttgtttttttgacagaatcttgctctgtcgcccaggctggagtgcagtggtgcaatctcagctcactgcaaccgcctcccaggttcaagccattctcctgcctcagcctcccaagtagctgggactacaggcacacatcaccatctagttttttttttttctttttctttttcctttttttttttttttttttttttttagatggagtcttgctctgtctcccaggctggagtgcagtggtgccatctcggctcactgcaacctccacctcccagtttaagtgattctcctgttttagcctcctgagtagctgggattacaggtgcctgccaccacgtctggctaattttgtatttttagtagagatggggtttcaccacattggccagtctggtcttgaactccagacctcaggtgatccacctgcctcggtcccaaactgtggggattacaagtgtgagccaccgcgcctgacccctagtggatgttctctttttttggtttttgtcctccccggaccgcccccgccccgagatgcagtcttgctctgtcacccaggctggagtgcagtggtgggatcttggctcactgcaacctcctcctcctgggttcaaggaattctcctgcctcagcctcctaagtagctgggattacaggcgtgtgccaccacacccggctatttttttttttttttttttgtatttttagtagagatggggtttcaccatgttggtcaggctggtctcgaattcctgacctcatgatatgtccgccttggcctcccaaagtgctgggattacaggtgtgagccactgcacctggcccctagtgggttttaaaattacagtgtcacctgttgctgtcacctgttgccttcccatcattcccagttcctgtgacgttgtcacctgttgctgtcacattgtcacactattaatgtcccccagaactgtccccccccgctgctgccactgtcatcccgttaaggtcactgtgagtcacgccagccccaccctccgtttgactttctgagcagccatggagccccccctcataggcgggacttgactgtgtgcacccagagccagcagaccccagatgttcattagcatgagctcgaggaaggcatggagacaggagtgggcagggtgtgcccaggagcacagggtcaaggctggggacaaggagatgggaggagggacggggagatgcctgcagtctatggtgtgtggagtgcgctgggccagcctaggccagggtggcttggggacagagccctctttgtataagcacaggaagcagctgggagtcaaagcattgcatacaacgccaggagtttggccacgtgcccaggaatgaggcttggagcggggagggaagccgcagaggacccaggaaagctctgaggaagagatcaagctggatcctcacaagagaccctgaagacaggctctgatatcatcccattacacagatgaggaaactgaggcacagagccaccacatcgcccactgggaccccaccaccaggaaagaatacaggcaaatctgaacccaggccacaaagctggaaccttccccgtggccttgggcccccagccacaccctcaccccattgccttgatgttctagctgggggacctgtctagggtccatatacaatatattatttctctttctaataaacacacatgtttgcacctttatacattgttctgtatttgccctatttcctctttgtaaaaataattaaaaacaaacaaacaaacaaaaaaacagggtctccctctgtcacccaggctaaagtgcagtggggaagataacagctcactgcagcctcgaattgggcttaagcaatcctcccacctcagcctccagagtagctaggactacaggcacatactacctgtctaatttaaaaaaatttttttttttagagatagagtctcactatgttgcccaggctggtctcgaactctgggatcaagtgatcctcccaactcatcctcccaaagtgctgagattacaggcatgagccgtcacacctggcctctttctctttctttctttctttctttctttctttctttctttttttttctttttttgttcagacagagtctcgctctgtcgcccaggctggagtgcagtggtacactctcagctcactgcaacctccacctcccaagtttaagcgattctcctgcctcagcctcctgagtagctgggagtacaggcgcccaccccacaccctaatttttgtagttttagtagagacggggtttcaccatattggccaggctggtctcgaactcctgaccatgtgatctgcccgcctccgcctcccaaagtgctgggattacaggcgtgagccacggtgcctggcctctttctctttctaataaacacaaatgttagcacctttgtatcttgttctgtatttgctttttctcatctttgtaaaaaaaatatatttttttcttgcaaactaaatcaatccctctcaattaccatcttctttttactgttttcttttactgagatcaatttcacacaacatagcacttactatgttcaagtgtacaattcagtagcgttcagtacacgcagtatgtgcagccaccccctctatctagttccaaaacgtactcatcaccccagaatgaaatcctgtccccattagcagttgctccccattccccataccccagtccctggcaaacactaatccactttctattctctgtggatttgcctgttccggacattgcacgtatttattttattttattttattttattttattttattttattttattttgagatgaagtctccctctgtcacccaggctggagtgcggtagtatgatcttggcttactgcaacctccacctcccaggttcgaatgtttccctgcctcagccttccgagtagcagggattacaggtgcacacggcaccgcgtctggctattttttttttttttggtatttttagtagaaacgggatttcatcatgttagccaggctggtcttgaactcttggcctcaagtgatccatctgccttgacctcccaaagtgctgggattacaggcatgagccaccgtgcctggcctagacgtttcacgtaaatggaatcacacactaggtggccctttattttattttacttttttttttttttttttttgtgacagagtttctctctgtcacccaggctgcagtgcagtggcgcgatctcggctcactgcaacttccgcctcccctgttcaagcagttcccctgcctcagcctcccaagtagctgggactacaggcacacgccaccacacctggcaattttttttttttttttttgtattttaatagagacggggtttcaccatgttggccaagatggtctctatctcctgacctcatgatctgcctgcctcggtctccgaaagtggtgggatcacaggcgtgagccaccacgcccagcctcttttaacttcttattacatcttggcaatatttccatgtcgagccgggagcgggggatcacacctgtaatcccagcactttgggaggccaaggcaggcagatcccttgagtgcaagagttagagaccagctggggcaacatggcaagctccgtctctacaaacaacacaaagattagccaggcctggtggcatgagtctgtagtcccagctactcaggagactgagatgagatcacttgagccccagatgtctgggagccccagatgtcactgtagaggctacagtgatccgagatcacatcactgcactccggactgggagacagagcaagaccctttcaaataaaaagaaagacagagagatagagaaagagagagaagaaaaaggaagaaagaggagaggagagaagatgcgcagtggctcacgtctgtaatcccagcactttgggaggctgaggcaggtggatcatgaggtcaggagttcaagaccagcctggccaagatggtgaaaccccatctctactaaaaatacaaaaaaaattagccaggcgtggtggtgggcacctgtaatcccagttacttgggaggctgaagaagagaattgcttgaacccgggaggcggaggttgcagtgagcagagatcatgccactgcactccagcctgggcgacagagtgagactctgtcaaaagaatggagaaagagagagagagagaggagaaagagaggaaggaaggaaggaaggaaggaaggaaggaaggaaggaaggaaggaaggaaggaaggaaggaaagaagggagggagggagggagggaaagaaagcaagagaggccgggatgcagtggctcaagcctgtaatcccagcattttgagatgccaaggtgggctttgaggtcagacttcaactggattaggattagccctgctgggagaagagaggactctggcacccactgccagttctgccatctgcacccatttatctggggccccaatgcccgcccagcctctctccctctggtctcatccttgcgggctaagggtgcacttgcagctttccactctgccctctgaaaccttaagggtgccattagttaagtcagacaagaagactgacactcaaaaataaagttggttaagtgcaaattgtcagacccagaaacctgaatatcactgatcttcagaaaacgcacatgtgccagggccttcattggcactcaataaacgctgaatcgatggatcagtaaatgaatgaatggtgagcaaatctgatatgaccggaaggaaggagtggaagttgcttgtggagagacgagcaggactcagattgaaaggagtcttgaaaaccaggagcgtggacatgacctggcggcagcagggagccacggtgggttctaggcagggagcgacgccatctgatttacctttgaggacctcattgccaagaggaagttaatcaaatctgtcactagggggcactcaagtcttcccatagattgttaggtggccactggtcacagggagcttttgagcatttgaaccagttctatggagatataagtgtgaaatccacacggaatcgcaagcacttcatacaagagaaagaatgtaagatgcctcaaatagcaatgacaggggtgaaatgctgatattttgggtacactggactaagtaaattatattattaaaatttcatctgtttctttttactttttaaaatgtgggttctaggccactcggtggcttacgcctgtaatcccagcactttgggaggcccaggtgggcggatcatgaggttaggagtttgaaaccagcctggccaacatggtgaaaccccatctctactaaaaatacaaaaaattagctgggcatagtggcagggacctgaaatcccagctattcgggaggctgaggcaggagaatcgcttgaaactgggaggcggaggttgcagtgaactaagatcgtaccactgcactccagcctaggcaacagagtgagactccgtctcaaaaatatatatataaataagtaaatatatatgaaataaaatgtgggttctaaaagagttaagattgtctatgtcggttgcattagtttttattttatttcttttttattaggcaagatcacgttctgttgcccaggctggaatgcagtggtgtgatcatggctcactacagcctcaacctcccaggctcaagcaatcctcctacctcagcctcccgagtaggtgggattacaagtgccgccaccacacccggctaacttttgtatgttttgtaaacacaaggtttcatcatgttgtcccagctgatctcaaactcctgggcccaagcgatcctcctgcctcagcctcccaaagtgctaggattatggacatgagtcactgagcctgaccttgcatttatatttctattggacagcactgatttagaaaaagaagttactatttttttcaacagtcatcaggggttgaactaccctctctttttctcttatttcctcttactttggtcattcttcaagttaacaatctaccaggttgttctctttgttcattaaacgaaggtagatattcataaatacatagaccaaaaagagaggatggggtcattgtttcataaatatggaatcatattgaacatacttttttattcacaggactttctggaaacttcttagaccacctactaaaatctgaattcattctttttaattgcttgataatcatctatggtgtggatgaaccttcatttattcaaccacatccccactgatgagttttcacttggttaacaggttttattccccaccactaccaaaaagtaagcaaaaaatgctgcaacaagaattttttggctgggtgcagtggctctcacctgtaatcccagcactttcggaggccaaaggcaggaggatcgcttcagaccagttcaagactagcctggacaatgtaatgagactcctgtctttacaaaaaaatttttaaaaactagccgaacatgatggcatctgtagtcccaactacttggaagtctgaggtgagagaatcacttgagcctgggaggttgaggctgcagtgagccatgatcacgccactgcactccagcctgggcattagagcgaggccctgtctctacaaaaattaatttttatacctatgcccatacgtgctgacgattttctttccaagggaaagatttctagcaatgaggttgctgggtgaaggatctctctctctctctctctttctctctctctctctctctctctctctctctctctatatatatatatatatatatatatatatatatatttttttttttttttttttttttttttgagaccgagtctcgctctgtcaccaggctggagtgcagtggtgcaatattggctcactgcaacctcctcctcccaggttcaagcagttctctgcctcagcctcccgagtagctgggactacaggcgcgtggcaccacgcccagctaatttttgtatttttagtggagatggggtttcatcatgttggccaagatgatcttgctctcttgacctcgtgatctgcctgcctcagcctcccaaagtgctgggattacaggcgtgagccaccgtgcccggcctatatttttaattttaatagatgttgccaggttgtagatattgacaaactgatcctaaaattgatacagaaagacaaagactgagaatagcctacaaaatatcaaagaagaaccaagttggaggactgtcactacccaatatcaagacgttctggaaatctgcaataaccaagacagtattggcaaaagaagacacacagatcaacagaacagaaagtccagaaataaatccacaccaatataatcaattgatctttgacaaaagctcacaggcaattcaacggagaaaggacagtctttttgctgtctatgcaatcaatgtgttccctgcccaatgcacatacaggccaatacatggcaccagcttttcagaaaataaaagctttattgcaagtcgactgcacggagacaggaagaaacattcaaatctgtctccgggagctgcaggctggggcagcttttataagcatagggtaatgaggcgtgttctgattggatcttgcactgaggtgatgccgggaggcatgatctgattggatccggccatgggatgatgtcagggctcactctgattggatcctgggtcctgtcatgcagtgtctgcttcttaattcagtctccacccctctctcctcagtgggagcacttaggttctgcctgtggttacacagttggttcacctggacatgctcaggttatgcgaccttctacctgggggtccgtggcaactgaaaaacaactcacaactctgctacataaaagttgaactgaccgggcgtggtggctcacgcctgtaattccagcactttgggaggctgaggcgggcggatcacctgaggtcgggagtgcaagaccagcctgaccaacatggagaaactccgtctctactaaaactacaaaattagccgggcgtggtggcacatgcctataatcccagcaactagggaggttgaggcaggagaatcgcttgaacctgggaggcggaggttgtggtgagccgagatcctgccattgcactccagcctgggcaacaagagtgaaactccttcttgaaaaaaaataaaaaataaaaagttgaaccattgggaccgggcgcggtggctcacacctgtaatcccagcacattgggagtccgaggcgggcagatcacgaggtcaggagatcgagactagccgagaccatcctggctaacatggtgaaaccccgtctctactaaaaatacaaaaacaaaattagccgggtgtggtggcgggcacctgtagtcccagctactccagaggctgaggcaggagaatggcgtgaacccgggaggcggagcttgcagtgagctgagatcacgccactgcacttcatcctgggtgacagagcgagactccaaaaaaaaaaaaaaattgaaccattgggaggccgaggcgggcggatcacctgaggtcaggagtttgagaccagcctggccaatatagtgaaaccccatctctactaaaaatacaaaaattagccaggtgtggtggtgctcacctgtaatcccagctactcaggaggctgagacaggaggatcacttgaactcaggaagcagaggctgctgtgagctgagactgcgccactagactccagcctgggcgacagagtgagactctgtcttcaagaaaaaaaaaaaggtgaaccagattggtctggtgtggttacattttccacagatggtgctagaacaatcagatgtccatacgcaaaaaataggcacagactttacacctttcgtaaaaaatgaatgcagccaggtgcagtggctcacgcctgtaatcccagcacttttgggggctgaaacaggagaattgcttgagcccaagagttcgagaccggccttgaacaagtgagaacccctctctacaaaaaattttaaaactttttaaaaatctaaaaacaaaacaaaacaaaaatgaacacagaccaggcacagtggctcacacctgtaatcccagcactttagaaggccaagatgggtagatcacctgaggtcaggggttcaagaccagcttggccaagatggtgaaaccccgtctctactaaaaatacaaaaattagccaggagtggtagtgggcacctgtaatcccagctacttgggaggctgaggcaggagaatcacttgaacctgggaggtgggggttgcagtgagtcaagatcgagccactgtactccaacctgggtgacagagtgagactcaaaaaaaacaaaaaaatgaacacaaaagggaccatagtgaggtacctagaattggaaaattcacagagacagaaagtagaatggaggttaccaggggctgggggaagagggatggagtgttattattatcataattattattattttgagacagtgtctcactctgtcaccaggctgtagtgcagtggcatgatcttggttcacttcaacctccgcctcccaggttcaagagattctcctgcctcagcctcctgagtagctgggactacaggcatgcgctaccacgcccggctaatttttttgtatttttagtagagacggggtttcaccatgttggccaggatggtctcgatctcttgacctcgtgatccacccgcctcggcctcccaaagtgctgggattacaggtgtgagccacagcacccggccagtgctattatttaataggtacagatttcccgtttggaaaaagttctggagatgaatggtgaagatattatgggaaagggctcccagttcagactccaagagagggttcttagatctcgcacaagaaagaattcaggacaagtccataaagtgaaagcaagtttattagaaaagtaaaggaataaaagaatggctattccatagacagagcagccccgaggcctgctggttgcccatttttatggttatttcttgatgatatgctaaacaaggggtggattattcatgcctcccctttttagagcatagagggtagcttcctgatgctgccacggcatctgtaaaccgtcatggcactggtgagagtgcagcagtgaggacaaccagaggccactcatgtcgtcatcttggtcttggtgggtttcagctggcttctttattgcaatctgttttatcagcaaggtctttataacctgtatcttgtgctgacctcctgtctcatcctgtgacttagaatgacttaaccacctgggaattcagcccagtaggtctcaggctgattttacccagcccttattcaagacggagtcgctctggtttacatacttctgacagtgatggttgcaaaacaacgcgaatgtacttaataccactgagttgcatacttaaaaatggtttgagaactaagctccgatattttttatcttgcccagattcctatctaaggggcctgccccacaaaccataaatcctcatcagatgggttttatttaatcctatatatcgtcacttactttccaacctgactctgccataacattatgtggcaaagaagaaaataaaagtattttaccccaaaacatgtttctttaccatattttgaaatggccttgggccaggtgtggtcgctcacgcctgtaatcccagcactttgggaggcggaggcaggcagatcacctgaggtcaggagttcgagactagcctgaccaacacggagaaaccccatctctactaaaaatacaaaattagtctggcatggtggcccattcctctaatcccagctactcaggaggctgaggcaggagaattgcttgaacccgggaggccgaggttgcagtgagccaatatcgtgccattgcactccaacctgggcaacaagagcgaaactctgtctcaaaacaaacaaacaaaccttggtctccataatcttttatctgaacctgaacatttcctttctattaatcccaggtctttattttgtttgtttgtttatttatttatttatttatttagagacagagtctcactctgttgcctagcctagagcacagtgacatgatctcgactcgctgaaacctccatctcccgggttcaagagattttcctgcctcagcctccagagtagctgggattataggcacctgccaccatgcccggctaatttttttgtatttttgatagaaacagggtttcatcatgttggtcaggctggactccaactcctgacctcaagtgatccacccacttcagcctccagaagtgctgggattacagaggtgagccaccatgcccagcttaatcccaggcctttagacaaactcaaccaattgtccaccagaaaatgttcaaatttacctatagcctggaagacccgccacctcctttgaattgtcccacctttctgtaccaaaccagcgtatttctcagatgtgtttgattgatgtctcttgcctccctaaaatgtatcaaaccaagctgctcccgaaccaccttgggcatatgttcccaggacctcctgagagctatgtcatgggctatgatcactcatatttgcctcagaataaatctcttcgaatattttaaagtttgactctttgcgttgacaggttaaaatggtaaattgtggctgggcgcggtggctcatgcctataatcccagcactttgggaggccaaggcggtcggatgacttgaggtcaggaattcgagactacccttgccaacatggccaaacaccatctctaccaaaaatacaaaaattaactgggcgtggtggcgcccgcacctgtattcccagctattcgggaggctgaggcaggagaatcgcttgaacccaggaggcggaggttgcagtgagccgagattgcaccactgcactccagcctgggcgacagagcaagactctgtctcaaaaaaaaaaaaaaaaaaaaaaagggtaaattgtatgccatatatattataccatgcaaacaaacacaaagaattgtagacctatatgtcaaatacaaagctataggtgatggtgcaagaggaaggtggagaatggaagggagagaaaacaaaaataaggaaggaaggaaggaaggaaagaaaggaagggaggaagggaggaagagagggaaggagggagggagggagggggagggggaggaggggagggggagagggaaggagggaggagggaggaggagggaggaggaagggaaggagaaaaaactctacaaaactctacaacttctagaagaaaatctaggtgatcttggccgggcgcagtggctcacgcctgtaatcccagcactttgggaggccaaggcgggaggatcacgaggtcaggagatcgagaccatcctggctaacacggtgaaaccccgtctctactaaaaatacaaaaaattagccaggcgtggtggcgggcacctgtagtcccagctactcgggaggctgaggcaggagaatggcatgaacccgggaggtggagtttgcagtgagccgagattgtgccaccgcactccagcctgggcgacagggtgagacgccatccccaaaaaaaaaaaaaagtctcattggtcctttggttgtataggcagctgctgctattttcttttcttttcttttagatggagtttcactcttgttgcccaggctggagtgcaatggcgtgatctcggctcactgcaacctccacctcccaggttcagttctcctgcctcagcctcccaagtagctgggattataggcacccaccaccatgcccagctaattttttgtaattttagtagagctgggaagtcaccatgttggccaggctggccttgaactcctgacctcaggtgatccactggcctcagccttccaaagtgctgggactacaggcgtgagccactgtgcccggccagcttagattttctaatacgatttttattctttatatatattttgtattttatatgtgtatctatatgtgtttagagatggggtcttactttttttttttttttttgagacggagttttgctcttgttgcccaggctggggtgcaatggcaccatctcagctcactgcaacctccacctcccaggttccagtgattctcctgcctcagcctcctgagtagctaggattacaggcctgcgccaacacgcctggctaattttgcattttttagtagagatggggtttctccatgttggtcaggctggtcttgaactcccgacctcaggtgatatgcccgcctcagcctcccaaaatgctgggattacaggtgtgagccaccgcgcccggccgggtcttgctcttttgcccaggctggagtacaatggcatgatcacagctcactgaagtctagacctctagggctcaagccatcctcccacctcagcctcctgaatagccaacaccaaaggtgcatgccaccacacctgactaattttgtttatcttttgtagagacaaggcctcactatgttgcccaggctggtctcgaactcctgggctcaagcaatcctcccaccttagcctcctggggacctggcatgcaatcacagatgtgtgccagtgtgtcttggcacaggattcacttgctttccagcaaattgcaacaggaggtcacagagcaacagaaccgagatctgatccaagtgtctgtggagggtgcagctgccagaccctgtggcgaggtcaaatgtgcaggtgggtggctaacttgggttctgtcccttagccgtagtaacacatgaagggggaaacccctttcccttgctgcttggccagctctctggggacacaggagccaggtagggcaggggaacagaccctagggaaagcaaggtgaaagggaaaagcctggactagtggcacacacctgtaagtcccagccactcgggaggctgaggtgggaggattgcttgagcccaggagttcaagcctgcattgagctatggttgcaccactgcactgcagcctgggcacagagtgagaccctgacccaaataataatacataaaaatacagaaagagaaagaaatgacaacatgtggaagagcctacagagaagagaaacaataaagtgcttcctagtttgggggtcgtcagaagacggggccccacaggaggggactggtctttctgtgaggttcacttgaggccaggagtttctctgtttcctgatgttttggcatcttgggccttgctaatgccggaaagacagcttctcccagggtttgccgatttcttcagggttagctaatttgttggagagtttgcaaacaactggcttgtccaagagcacacggttcctatggaaagctcacaccccacaaccaccttttttgcagagctgtgacaatccaagcctgttgccctgacctgattactttagggccatgtgccaggcaattagggacagcacgtatgccccagagcctggagaaattattcaaaatagcccgtggcaactttcatctgcctcactgtgcctgtcccatggaaactataataaaggctcttacccacattttctcctgctctctccgcctcctttttttttttttgagacggagtctgcttctgttgcccaagctggagtgcagtggtgcaatgtcagctcactgccacctccgcctcccagattcagtgattctcctgtctcagcctcctgagtagctgggattacaggcagccgccaccatgcccggctaatttttgtatttttagtagagatggggtttcaccatgttggccaggctggtctcaaacgcctgacctcaggtgatctgcctgcgtcggcctcccaaagtgctgggattacaggcgtgagccactgccccaggtctctctctctctctttttttttttttttttttttttgagaacagggtcttgctctgttgcccaagctggtatgcagtggtgcaatcacaactcactgcggccttgacttcctgggcccaagcaatcctctcacctcagcctcccaagtagctgggaccatggggcatacaccatcatggccagcgtgtaaaaatgggatcttgctatgttgcccaggctggtctcgaactcctggcctcaagcaattctcccaccttggccccccacagtgttgggattacaggtgagagccactgtgtctggcctcctgctacattttaaaataagaagcaggggccgggcgtggtggctcacgcctgtaatcccagcactttgggaggccgaggcgggcggatcacgacgtcgggagatcgagaccatcctggctaatgcggtaaaaccccgcctctactaaaaatacagaaaaattagccgggcgtggtggtgggcgtctttagtaccagctactggggaggctgaggcgggagaatggcgtgaacccggaaggcggagcttgcagtgagccgaatcgtgccatgcactccagcctgacgagactctgtctcaaaaaaataaataaataaatataaaataaaataagaagcaggtcaggcacagtggctcatgcctgtaatcctagcactttgggaggctgagacaggcagatcacctgaggtcaggagtttgagaccagcctggccaacatgatgaaaccctgtctctactaaaaatacaaaaaattagctgggcatggtggcaggtgcctgtaatcccagctactcaggaggctgaggcaggagaatcgcttgaacccaggaggtggaggtcgcagtgagctgagattgtgccactgcactccagcctgggtgaccaagcaagattccattaaaaaaaaaaaaggctgctggttgaggtggctcacgtctgtaatcatgtcactttgagaagctgaggagggaggatcgcttgaggccaggagtttgagaccagcctgggtggcatagcaagactccatctctaaatataaggtttttttcagccaggtgtggtggctcattcctgtaatcccagcgctttgagaggctgaggtgggtggattacctgatgttaggagttcaagagcaacctggccatctccagcctgggcaacaagagcgagactccatctcaaaaaaagcaaaacaaaaaaaatacttttttctaagagacagtgtcacctaggctggagtgtcacccaggctgtgtcacccaggctggagtgcagtggcatgatttcagctcactgcagcctcaacctcctgggctcaatcaatcctcccacctgagcctcctgagcagctgggaccgaaggcatgcaccaccacacccggctaacttttgtgttttttgtagatgctgggtttcgccattttgcccggactggtctcgaactccagagctcaagacatcctcctgccttggcctcccaaagtgccaggactacaggcgtgagccactgaacccagctggctaaataaacttcctaaattgattgagacctgactcagatactttgagtttacacagctcaattcatatctgttcatgcattaaatgaatggattttctttttcttttcttttttttttttttgagatggagtctcgctctgttgtccaggctggagtacagtggcactatctcggctcactgcaacctctgcctcccaggttcaagtgattctcctgcctcagcctcccgagcagctgggattacaggcatgtgccaccatgcccagctaatgtttgtatttctagtagagacgggtttttaccatgttggccaggctggtctcaaactcttgaccttaagtgatctgcccacctcagcttcctgaagtgctagtattacaggcatgagccaccgcgcccagacttttttttttttttgagacagagttttgctctttttgcccaggctggagtgcaatggcacgatctcagctcactgcaacctccacttcccaggttcaagtgattctactgcctcacccttccgagtagctaggattacaggcacccgccaccatatctggctaatttttgtatttttagtagagaaagggtttcaccatgttggccaggctggtcttgaactccttgacctccagtaatccacccgcctcggcctcccaaagtgctgggattataggcataagccactgcacccggcctaaatgaatggattttctgctcctgttcaggggcttgggtaaagctgtcatgaggataaaaggatcagagagatgaaggggttatagaagtgggagtagtgccaggcacggtggctcaagcctgtaatcccagccctttgtgaggctgaagcagtcagatcacttgaggccaggagttcaaaactaacctgaccaacatggtgaaaccccatctctacaaaaatacaaaaattagccaggtgaggtggcaggcgcctgtaatcccagctactcagaaggctgaagcaggagaattgcttgaacctgggaggcggaggttgcagtgagctgagatcgtgccattgcactccagcctgcacaacagagagagactctgtttcaaaagacaagaaaagacaagacaaggctgggcgcggtggctcacacctgtaatcccagcactttgtgaggccgaggcgggcggatcataaggtcaggagatggagaccatcctggctagcacggtgaaaccccgtctctactaaaaatacaaaaaatttgccgggcttggttgcaggtgcctgtagtcccagctactcaggaggctgaggcacgagaattgcttgaacctgggaggcggaggttgcagggaggcggaggttgcagtgagccgagatggtgccattgcactccagcctgcacaacagagcgagactctgtttcaaaagaaaagagaagaaaagaaaagacggtagttacaggtcatagggagtgggattctgggcgtgggctatgccatatttcacaggggtgtcagcggggttgggagctccgggaattgccctcaagtcacaggttcctgctttgtgggtcctgaggcttccctctgccaaggaaaattcgggatttctttctgctaatgtctgggatcattggccactgcccaggctgcctcagtttcccctgggagaccaaaaacacaagggtgggggaagccacagagcacggggtttgcagcacctttctcaggcaggtcaggggcctcttgtgactggatgaggctattttgcctaccctgaattcacactaggagaaaatcgtgcctttcccggagtatttacccaccaaagaggagtagggctgtgaacagcgtccggagtgaggtgtccaggtatgaattatgtctctggccacatgacactagacaaatttagagattccccctaagcctcagttttctcatctgtgacatgagagaaataatactaggttggtgcaaaaataattgcgttttttgccattacctttttgttttaaagacagagtttcgctctgttgccaggctggagtgcagtggcatgatcttggctcactgcaacctccacctcccgggttcgagcgattctcctgcctcagcctcccgagtagctgggattacaagtgcgcgccaccacacccagctaattttgtatttttagtagagatggggtttcaccgtgttggtcaggctgatcttgaactcctgaccttgtgatccacctgcctcagcctcccaaaatgctgggattacaggtgtgagccactgtgcccagctttgcctttacttttaattgcaaaaaccgcaataacttttgcaccaatgcaatatttgcttctggagaggatagtgtaggttaaatgagatgttggtggataacccttagcagaggggctggcatgatccattgtggaccctataaatagcctagaaaattagaagagaagctggacgcaatggctgatgcctataatccaagcaatttgggaggccgagacgggaggatcacttgaggccaggagtttgagaccagcccgggcaacatagtgagaccccatctctaaaaataatctttaaaaattagccaagatggccgggcacggtggctgacgtctgtaatcccagcactttgggaggccaaggcaggtggatcacctgaggtcaggagttcaagaccagcctggccaacatggtgaaaccctgtctctacaaaaatacagaaaaaaaattagccgggcatgatggcaagtgcctgtaatcccagctactcgggaggctgaggcagaagaatagcttgaatctgggaggcagaggttgcagtgagccatgatcccaccattgcactccagcctgggcgacagagagagactctgtctcaaaaaaaaaaaaaaaaaattagccagccatggtggcatgcacctatagtcccagctacttgggaggctgaggtgggaggatcgcttcagcccaggagttcaaagctgcattgagctatgactgggccactgcactccagcctgggcaacagagtgagaccctgtcttaataataaaaatacagaaagaaaaagaaatgacagtgtgtggaggagctcatagaggagagaaacaatgaagggcttcctagtttggggggtcttcggaagatggggccccatgggaggggactggtctttgagttgttgaggtaatttaattcattgttctttcgtgagctaattgtatgtggaaatttatgtaaatctttggtaatcatcctttgaggaatctgctgctatcaagaaagaaaaagtcagtgtcaaccagcaaaaaaatggaaaaaatcaaatagtgattgctgttttttttttttttttgagacggagtcttgctctttcgcccaggctggagtgcagtggcactatctcagcttactgcaagttctgcctcctgggttcatgccattctcctgcctcagcctcccaagtagctgggactacaggcacccgccaccatgcccagctaattttttgtatttttagtagagacggggtttcaccgtgttagtcaggatgatggtctcgatctcctgacctcgtgatccgtctgcctcagcctcccaaagtgctgggattacaggcgtgagccaccacgcccggcctttttttttgagagtgtctcactctgtcacccaggctgcagtgcagtggcatgatctcagctcactgcaactgccacatcctgggttcaagtgattctcctgcctcagcctcctgagtagctgggagtacaggcatgcgccaccatgtctggctaatttttgtatttttttttttttgtagagatggggattcaccatgttgaccaggctggtcttgaactcctgacctcaagccatctgcccacctcagcctcccaaaatgctgggattacaggcatgagccaccgcgtctggcctatttgaatttttttaatccatactgcaatgctagtggagaaggagaatgagttttatggtgtggtttcaagagccctgcagaaaaagtaagtatcttgaagcaggttgttattattattattattattattattattattattattattattttctggagacagtctcgctgtgttgcccatgctggagtgcagtggtgcgatctcaggtcactgcaacctccgcctcctgggttcaagcaattctcctgtctcaggctcccaagtagctgggattacaggcccaagcctccacgcccggctaatttttgtatttttggtagagacagggtttcatcatgttggccaggctggtcttgaactcctgatctcaagtgatccacccacctcagcctcccaaagtggtgagattaaaggtatgagccactgcacacagcctatgttgtttgtttgtttgttcgcttgtttatttctgagacagagtctcactctgtcgcccaggctagagtgcagtggcaccattgcagctcactccagcctcgacttcctgggcccaagtgatcttcccacctcagccttccaagtagctgagactacaggcatgggcacaaaatgttgaataaaataacacagccttcgttaccaggaatcctcagtaaagcaaagctcatctactactatttagttttcggtttatttgtggactcttcggttcttgcagtgatgtatgtactcatgatgaattcttcttggacactgaaccatatcctctcactgtggaaagctgggaattacgctagtattgttcatccaccacgtggtatgcgggcatttctgaacattccctgacttcagaaaaagatgaccccaggacatttggtggtttctgttggccagttcagacctgaaattaatcttcctttgcagatcagagcttttgagaaatagttaaacaagatgattgaggccaggcgcggtggctcatgcccgtaatcccagcactttcggaggctgaggcaggtgggttacctgaagccaggagttcaagaccagcctggccgacatggtgaaaccatgttactactaaaaatacaaaaaacattaaccaggcatggtggcatgtgcctgtaatcccagcttcttgggaggctgaggcatgagaattgcttgaacccaggaggcggggttgcagcgagctgagatcgtgccactgcactccagcctgggtgatagagcaagactctatctcaaaaacaagatggtgattgagtcacctcctttattgaaacctgttctcattagagattgttgtaccaaagatgatgagacttcagatgaaccaactaagaaagctgtctgaggatttaggaattttaaaaggtgtggaatttcaaagaaatattccattttgatgaagtaaaggttaaagaagtgcttgtctgaagagacagttgatctgcataccacgcagaacaagtattttgggatgggtgttgtgaaagttttggccaacacaatttttttttttttttttgagacagaatcttgctctgccatccaggctggagtgcaatagcatgatctcggctcactgcaagctccacctcccaggttcaagcgattctcctgcctcagcctcctgggtagctgggactacaggcaggtgccactatgcccggctaatattttgcattcttagtagagactgggtttcacagtcttagccaggatggtcttgatctcctgacctcgtgatctgcccacctcagcctcccaaactgctgggattacaggcgtgagccaccatgccggccttttttttttttttaagagatagggtcggtccaggccaggtgcggtggctcacccctgtaatcctagcactttgggaggccgaggcaggcagattgcctgagctcagaagtgtgagaccacgctgggtaacatggtgaaaccccgtctctactgaaatacaaaaaattagccagatgtagtggtgtacgcctgtagtcccagctactcgggaggatgaggcaggagaattgcttgaacccgggagatggaggttgcaatgagctgagatcactccagtgcactccagcctgggtgacagagtgagactccatcccccaaaaatatatatataaataaatccaataaataaataaatgagatagggtcggttgggcatagtggctcacacctgtgatcccagcactttgggaggccgaggcgggtggatcacctgaggtcaagagttcgggaccaccctggccaacatggtgaaactccgtctctactaaaaatacaaaaattagccaggcgtggtggtgcatgtctgtaatcgcagctactcgggaggctgaggcagggaattgcttgaacccgggaggcggaggttgtagtgagccaagatcgtgccactgccctccagcctgggcgacagagcaagactccatcaaaaaaagaaaaaaaagactgggtctttctgtcacccaggctggcgtgcagtgacatgattatagctaactgcaacctcgaccactgcggctcatgtgatcctcctgcatcaacctcctgagtagctgggactacaggtgcacacaaccacacccagttaatttttaaagtttttgtagagatgaggtctcaatatgttgccagagctggtctcaaactcctgggctcaaggagttcaaaagttacgaaaattataagttacctttttgagagagagagaaagtcttgctatgttgcccaggctggagtgcggtggttattcacagacaggatcatggcacactacagccttgaactcctgggctcaaatggtcctcctgcctcagcctcccaagtaactgagaatacaggtacatgcccagctaaaagttactttaattaaaggtaactatctaggccgggcacagtggctcacgcctgtaatcccagcactttcggaggccgaggcgggcggatcacgaggtcaggagatcgagaccatcctggctaagacagtgaaaccccgtctctactaaaaatacaaaaaattagcagggcgtggtggcaggcgcctctagtcccagctacttgggaggctgaggcaggagaatgacgtgaacctgggaggcagagcttgcagtgacccgagatcacgccactgcactccagcctgggcaacagagcgagactccatctcaaaaaaaaaaaaaaaaaaaaaggtaacaacctaggcagggtgcggtggctcatgcctataatttcagaactttgggaggctgaggcaggcagatcacgaggtcaggagatcaagaccagcctggccaacacggcaaaaccccatctctactaaaaatacaaaaattagctgggcgtggtggcacctgcctgtaatcccagctactcaggaggctgaggcaggagaattgctggaacccgggaggtggaggttgcagtgagctgagatcgtgccattgcactccagcctgggtgacaggacaagactccgtctcaaaaaaaaaaaaaaaaaaaaaaatctatagtaaatgccttctaaaaccgtatctttatcactgccctataactctatatagattcttggctactaagccaatagctgggatgatataaatgtaatgcagctgctatctgaataacaagcatggaaaagtgaatatgtgtgtgtgcagataatgctctacaaacatacaacttatgacattttctgtaaccataatcaatttcttgtagttcagtgagttgacccccttcatgatcagtgttaggggcatgtgaaagaggtgattggttgattgattgattgattgattgatttagagacagagtctctgtctgtcacccaggctggagtgcaaaggtgtgatcttggctcgctgaaacctccgcctcctggctgcaagcaattctgctgcctcagcctcccgattagctggaaatacaggcacctgccaccacgcccagctaatttttgtatttatattgaagacgggatttcaccatgttggccaggctggtctcaaactcctgaactcaagtgatccacccacctcggcctcccaaagtgctgggattacaggcatgagccaccacacctgaccaaagaggtgtattattcttttgcaatttccttttaaccagctggttttgttatctacttctgattatgtcgctgatacaggccattttctgttatcagatcaaaaagcagcaaagccaggcatagtagtgcacaactatagtctcagctactcaggagcctgatgggagaattgcttgagcccagattgaggccacattgagctgagatggcactaccatactctagcctgggtgacagagcgagaccctgtctcaattaaaaaaagaaaagaaaagaaacaggccaggcgcggtgtctcacgcctggaatcccagaactttaggaggccgaggcgggtggatcatttgaggtcaggagtttgagaccagcctggccaacatggtgaaaccctgtctgtactaaaaatacaaaaattagccagatatggtggcaggcgcctgtaatcccagctacacaggttgctgaggcaggagaatcgcttgaacccaggaggcagacagaggttgcagtgagccgagattgcgccattgcactccagcctaggtgacagagtgagactccatctcaaaaaacaaacaaacaaagaaaacacaaaacttttatggaattccagaatcctttcttccttcactacttcctctacttttgctctatttcaaattatttatttttgacctcataattttttgtgtgtggatgggtaggcagaatgaattaacagtacaaatcttacctcaaagactagctataaaataagaaaaagcgccaagccagagtttgaacttccaggttataatactgattctgtcatcaaacagctttgtgacaccaaaggagtttactaagttctttggatttatttattattatgttagatggagtgtcactctattgcccaggctggagtgcagtggcacaatctcggctcactgcaacatctgcctcctgggttcaagcgattctcctgcctcagcctcccgagtagctgcgattacaggcatgtgccaccttgcccagctaatttttgtctttttagtagagacggggtttcaccatgttggccaggctggtctcaaactcctggtctctagtgatttgcctgccttggcctctcagagtactgagattacagacgtgagccactgtgcccagctggaaatggattttaaatctctgagatgtgaaagcattttctaagcttaagagcagagggcaaaatggtcaagcaatgtactgagttgtctctctttaaaacttaaagaggaattcttagccaggtgctgtggctcatgcctgtaatcccagcactttgggaggccaaggtgagagaatcacttgagcccaggagtttgagaccaacttgggcaatgtagtgagaccacatctctgcaaaaaataaaaattagctgggtatggtcgcacatgcctgtaatcccacctacttgggaagctgaggtgggaggatcacttgaacccaggaggctgaggcttctgtgagctatgatagttccactgcaccccagcctgggcaacacagtaagactctatctctaaaaaagaaaagagaatgagacatcttttgtctattttaatctaacctttttttttttttcctgaagactcttaccccagcttgcagcttttttttttttttttttttttttgacagagttttgctttgtcgtccaggctggagtgcagtggcgtaatttcggctcactgcaacctctgcctcccaggttcaagtgattctcctgtctcagcctccctagtagccaggattacagacacacaccaccatgcccagctcatttttgtatttttagtagagatggggttttgccatgttggccaggctggtctcaaactcctggcctcaggtgatccaccctcctcagcctcccaaagtgctgggattacaggcatgagcgactgtgcccggccagcttgctgcttttagcataaatttcaggcttctggtgagctcttggcaacatgtaccaagaatcataacgtgtttgcctttttccagccagtatttccactgctgggaatccatgagaaagaaatatgagaaataggcaaatatttacatataacaatgcttctgttattgttattttaatattcagttagtgcaaagcctgaggtatccggtacgctgtgtacaatcacgtgataagatccaatatgcagttatgaaaaatgtttgtagattttctttaacaatatgtaaaatattttcatactatttttacagaaaaaagcaggatattgggaggccaaagcaggcggatcacttgaggcaaggtgtccaaggccagcctggccaacatggtgaaaccccatatctactaaaaatacaaaaaattagcagagtgtggtggcacaagcctgtaatcccagctatttgggaggctgaggcaggagaattgcttgaacctgggaggcagaggttgcagtgagccgagatggcaccattgcactccagcctgggtgacagagtgagactccatctcaaaaaaaaaaaaaaaagaaagaaaaagaaaaatgcaggatataggataaaacatttttttctagatgttgccgtaattaaaaattttgttgcctatatggccaggagtggtggctcacgcctgtaatcccagcactttgcgagccgaggtgggtggatcacttgaggccaggagttcgagatcagcctgggcaacatggtgaaaccccatctctactaaaaatacaaaaattagccgggcgtggtggtgcatgcctgtaatgccagctactcgggagggtgaggcatgagaagtgcttgagtccgggaagtggaggttgcaataagctgagattacaccgctgtgctccaccctgggtgacaaagcaagactgactcaaaaaaaaaaaaaaaaaaaaaagatgtttcctatatagcaacaggaaatctcactctttgctgagagaaatgccaaacagtacagccactctagaagacagtgtgacagcttcttacaaaactaaacatactcttaccatataaccaattaatttcactcctagatatttacccaaacgagttgaaagctcatgtctacaagaaaacccgcacatgggccaggtgcagtggctcatacccgtaatcccaacactttgggagaccgaggcgggcagatcacgaggtcaggagttcaagaccagcctggccaatatggtgaaaccctgtctctactaaaaatacaaaaattagctgcgcgtggtggcatgtgcctgtagtcccagctactcaggaggctgaggcaggagaatcacttgaacccgtgaggcagaggttgcagtgagccgagatcacaccactgcactccagcctgggcgacacagggagactccgactcaaaaaaaaaaaaacaaactggccgggtgcggtggctcatgcctgtaatcccagcactttgggaggccgaggcgggaggatcacgaagtcaggagatcgagaccatcctggctaacacggtgaaaccctgtctctactaaatatacaaaaaattagccgggcatggtggcaggtgcctgtagtaccagctactcgggaggctgaggcaggagaatggcgtgaacccaggaggcagagcttgcagtgagccgagatggcgccactgcactccagcctgggcgagagagtgagactctgtctcaaaaccaaaaaaacaaaacaaaacaaaacctgcacacggatgtttacagcagtattattcataattgcataaaacttggaagcaaccaagatgcccttcgggagttgaatgaataaataaacagtggtactttcagacaatgggaactcattaattaaaataaatgagctcttgctgggcacagtggcacaagcctgtggtcccagatactcaggaggctgaagtggaaggattgcttgagcctaggagttccaggtcagactgggggacagagaaagaccatgtctctaaataaattaatttaaattacaatatattttttcttttcttttcttctaacacagaatctcactcttgtcacccaggctggagtgcagtagtgctatcttagctcagtgcagcctccgcttcccaggttcaagcaattctgcctcagcctcctgagtagctgggactacaagtgcgtgccaccacgcccggctaatttttgaatttttagtagaaacagggttccaacaagtttgccaggctggtctcgaactcctgacctcaagtgatctgcccaccttggcctcccaaagtgctggaattacaggtgtaagccactgtgaccagcctaaaaaaattttttaattatccaggcatgatggtgcacctgtaatcccagctactcagggaggctgaggcagggggatggcttgagctggagaggtcgacactgcagtgaactgtgatggtgccactgcactccagcctggatgacagagaaagagcctggctaaaaaaacatataactagccgagcaaaactccttctcaaaaaaaaaaaaaaaaaaaaagtgagccctaatgtaggctgtggactcggggtgatgaggacgggtccctggagattcatcaagtataaccaatgcaccactctagtggcggacattgataaggaggaggctgggcttggggagcagggtagatatatgggaaatctctgtactttccactcaattttgctgcaaacctgaactgctataaatcagaacgtttatgggctgggtgcagtggttcacgcctgtcatcccagcactttgggaggccaaggcaggaggatcgcttgagcccaggagtttgagaccaccctgagcaacatagcaaggccccatctctacaaaaaaaaaaaaaagaaagaaaatacaaaaattagccaggtgtggtggtgtgcatctgtagtcccagctactcgggaggctgaggcagaaggatggcttgagcctgggaggtggagttggcactgagctgtgattgcatcactgcactccagcctcagtgacagagccagaccttgtcttaaaaaaaaaaaagcccatgggaaaacaaatactgttttcctctgcttgagtgaaagaagccagtctcgctgggcgcggtggctcacgcctgtaagtcccagcactttgggaggccgaggtgggcagatcacctgaggtcgggagttcgagaccagcctggccaacatggagaaaccccgtctctactaaaaatacaaagttagctgggcatggtggcgcatgcctgtaatcccagctactcgggaggctaaggcaggagaatcgcttgaacccaggaggtggaggttgcagtgagccgagatcgtgccattgcactccagcctgagcaacaagaatgaaactccatccaaaaaaaaaaaagaaaagaaagaaagaacccagtctcacaaggctatccagtgtgtgactgattccatttatacaacagtcccggaaaggctaaattatggcgacagagagccgatcagtggttgtcaaggagaaggaaggaaggatgtgactcctaacgggcagtgtaagggaattttacggggtgatgaagttgttctttttctttctttctttctttctttttttttatttgagacagagtctcgctctgtcacccaggctggagtgcagtggatctcggctcactgcaacctccatcccctgggttcaagcaattctcctgcctcagccccccgaggacctggaaccacaggtgtgcgccaccatgcctggctaatttttgtatttttaatagagacggggtttcaccacattggccaggctggtctcaaactcctgacctcaggtgatccacctgcatcagcctcgcaaagttctgggattacaggcatgagccaccccatccagcattttttttttctttttttttttctttttctttttctttttcttttctttttttttttttctttttttttttttttttttttttttgagacagtcttgctctgtcgcccaggctggagtgcagtagtgtgatctcagctcactgcaacctctgcctcccagattcaagtgattcttatgcctcagcctcccaagtagctggtattacaggcatgcgccaccatacctaggtcatttttgtatttttgatagagatggggtttccccacgttggccgggctgctcttgaaatcctgaccttatgtgatccgctggactcggcctctcaaagtgctggcgttacaggcatgagccacagcgcccagccagattttaatttttttttttatagatagggtctcactacattgcccaggctggactccaactcctaggttcaagcaatgccgcctcggcctcccaaagtgctgggattacaggtatgaggtgctgcatccagcctaaaaaattgatttaatgcaaaaaaaaaaaagaaaatcctggtgcctgacccctggctgtcctcagctggcccataagaccctgatgacttttgagctctgaatcaagggttggcatatctagacctgctgcaagctacagatactcagaaccatgcacgaggttgcaaatcctacatatgatttccagaatccacatcccatctgcactctttctggtagagcacaccttgttcctggggctccaggacaaatgggtgcatcaaagctaacttccggccctgggcagtggctcacgcctgtaatcccagcactttgggaggacgaggcaagaggatcacctgaggtcaggagttcaagaccagcctggccaacaaggtgaaaccccatctctactaaaaatacaaaaattagctggatacggtggcccatgcctgtaattccagctactcaggaggctgaggcaaaagaatcgcttgaacctgggaggcggaggttgcagtaagctgagctcatgccactgcactctagccttggagacaaagtgagattctggcaaaagaaaagaaaagaaaaaaagctaccttccaccagccacaatggctcacgcctgtaatcccaacattttgggagcccaggagtttgagaccagcctgcagcctgggcaacatagcaggaaactctctctaaaaaggaagaaaagaaaaattcgccaggcatggtggcgcacacctgtagtcccagctacttggaaggctgaggtgggaagctggcttgagcctgggaaattgaggctgcagtgagctatgatcatgccactacactccagcctgggcaacagagtgggaccttgtctcaaaagaaaaataaaaagtctaccttctacgtggtctctctggctacctcagtcatactgatcccttggctatactgatcattcagtcacatcccactctgacccctggactcccctggccactgacctatagtgacctgctctctttggtccctgcagggagacacatttgaaacctacaagtacccaggggaaaaaaaaaaaaaaaggccattacttccttaatctgtatctgtttttaagtggaattgtatccataagcaacccagagtgctattatgtttcaaatttatataaacagtatcacactaaactaacattgcacaacttgaatttctttttgaaacagcaccacattaagatacatttatattgacatagagtagagctggagagagtgagagtgagagcaaggcaagagagagaaagagagacacacagacagggagagttacttattccttttcactcctgtttaatattccattaccttaccattacatttcgttctcctttcatttctctactccctcattgatggacgttctgatagtttctttttttcttttcttttttttttttttttttttttttgaggcagagttttgttcttgctgcccaggctggagtgcaatggcgcgatcttggctcactgcaacctccaccacctgggttcaagtgattctcctgccttggcctcccaagttgctggtattacaggcatgcgccaccacgcctggctaattttgtatttttagtagagatagggtttctccatgttggtcaggctggtctccaactcccggcttcaggtgatctgcccgcctcggcctcccaaagtgctagggattacaggtgtgagccactgcgcccagccttttttgtttttgtttttgtttttgtttttgttttgttagagatggggttttatcccgtcacttaggctggagtgcagtggtgtaaacatggctgactgcagcctcgacttcctgggctcaggtgatcttcccacctcaggctcttgagtagctgggaccacaggtatgcaccaccatggccagctaatttttagtttttttagagatggagtcttgctatgttgtccaggctggtattgaactcctggactcaagcattcctcctgcctcagcctcccaaagtgctgggatgacaggtgtgaaccaccgagcccaacctagtagttaagttttgaggagtcaaaagttatatgtgaggggctcggcacagtggcctgtcatcccagcactttgggaggtggaggctggcagatcacttgaggtcaggagttcaagaacagcctggccaacatggcaaaaccctgtctctactaaaaatacaaaaattagccaggtgtggtggcacgcacctgtggtccagctattctggaggctgaggcatgagaatcccttgaacccaggaggcagaggttgtagtgagccaggattgtgccattgcactccagcctggatgacagagtgagactgtctcaaaaaaagaaaaaagaaaaaaagttatatgtgggtccaggtggggtgactcatgactgtcatcccagcactttgggaggccaaggtgggaggatcacttgagtccaggagttcaacaccagcctggaaaacatagcaagactcctgtctctacaaaaaattagctggacatggtggcaggtgcctgtagtcccatcaattcgagaggctgaggcaagaagatcacttgagcccaggaggtcaaggctgcagtgagctatgattgcaccactgcactccagcctgggtgacagagagagagagacagagagagagcaacggaaggaaggaaggaaggaaggaaagaaggaaggaaagcgataaatgaaaaggaggccaggcacagtggctcatgcctgtaatcccagcactttgggaggccaaggaaggttgatcctctgaggtcaggactttgtgaccagcctggccaacatggtgaaaccccgtctctactaaaaacacaaaaactagctgtgcatggtggtgggcgcctgtaatctcagctacttgggaggttgaggcaggagcatcacttgaacctaggagccggaggttgcagtgtgctgagattgtgccactgcactccagcctgggcaacaagagtgaaactctgtcaaataaaagaaaaaagagaaggaaagaaagaaaggaaggaaggaaggaagacagagaaaggaaggaagaggaagagagaaagggagggtagggagggaaggaaggaaagaaagaaaatgaaaaggacaaaaactccaaaggacaaatgagtctttcacaaaaggtgatctccaaatggctgataaatgaaagagggctgacctcatgagtcatcagagaaatgcacatgaaacccaaaatgctagcggggcgtggtggctcacgcctgtaatcccagcactttgggatgccgaggccagtggatcatgaggtcaggagttcgagaccagcctggccaagatggtgcaaccccgtctctactaaaaaatacaaaaattagtcgggtgcggtggcgggtgcctgtaattccagctactcgggaggctgaggcaggcgaatcacttgaacccaggaggcggagtctgcagtgagccgagatcacaccactgcactctagcctggtcgacagagcaagactccatctcaaaaaaaaagaaaatttaatatcaagttatactcccacactctggagagcgtgtgaaatggtacaaccgctttggaaaaccctggcaatatccagaaagctgaacaaacacctacacaatatgaatcagcatttctactcctaagtataaacttaaagaatatacattgttgcattcatccagaaactggccagaatgttcacagcacctgtgcttatcacagccagaaattggaaacaacccaaatgcctaaaaaagtttaggtaaataaactgtggtaagttcacaaaagggaagacagcggttctcaaccgggtggtgatttttttttttttttttttttttttttgagacggagtttcactcttgttgcccgggctggagtgcaatggtgtgatctcagctcaccgcaacctccgcctcccgaattcaagcgattctccctcctaagccttctgagtagctgggattacaggcatgcaccaccgcgcctggctaatgtttgtgtttttagtagaaatggggtttctccatgttggtcaggctggcctcgaactcccgacctcaggtgatccacctgccttggcctcccaaagtgctgggattacaggcgtgagccaccacgtctagtcgactgggtggtgatcttatcgcttctaagggaatatttggcaatgtctagcgatgttttgcgttgtcagaaccgaagggaggagtgttactgtcacgctgtgagtagaggcctgggatgccgctaaatacatacaatgtgtaggaacaaagattattcagctccaaatgtcaacagcagttgagaaaccttgctataccaaatggcaacgggctggacgcggtgtctcatgcctgtaatcccagcactttgggaagccaaggcgggaggatcacttgaggtcaggaatttgagaccagcctggccagcatggtgaaaccctgtctctactaaaaatacaaaaatcagccgggcgtcgtgacacagtcctgtggtcccagctatttgggaggctgaggcaggagaatcacttgaacgtgggaggcagaggttgcagtgagctgagatggtactccagcttgggtgacagagcgagactgtctgaaaacaaaacaaaaaaaaaatggcaaggaacaataactgtaacctacaaaaatatggatgaaccacacaaacctggtgttacacaaaagaaaccaaacataaaggaaacgtcctgcttgttttcatttatataatgttcaaatagcagacagagtgattctagactgttaaaaatcaagataagggctgggcacggtggctcgcacctataatcccagcattttaggaggctaaggcatgaggattgcttgaggccaggagttccaacccagcctgggcaacatagtgaaacccatccctacaaagaaatgcaaaaatttgctgggcgtgatggcgtgtgtgcctgtagtcccagctacttagggggctgaggtgggaggatcacttgagcctgggaggtcaaggctgcagtgagccgtgatcgcaccacttcactacagcctgggtgacacagcaagaccctatctcttaaaaaaaaaatggggttaccctttgtggagagtagcagggcagggtacaatgggggacttctaggggctggtgatgttctgttcttttttttccttttttgagatggaatctcactctgtcggccaggctggagtgcagtggcatgatctccactcactgcaagttccgcctcccgggttcacgccattctcctgcctcagcctcccgagtagctgggactacaggtgcctgccaccatgcccggctaatttttttgtatttttagtagagacagggtttcaccgtgttcgccgggatggtcttgatctcctgaccttgtgatccacccgcctcggcctcccaaagtgctgggattacaggcgagagccaccgcgcctggactgttgtttttttttttttttttttggtttttttttttttgagacagagtctcactctgtcgcccaggctggagtgcagtggcttgatctcggcttactgcaagtttcgcctcccgggttcacaccattctcctgcctcagcctaccaagtaggtgggactacaggagcccgccaccatgtccagccaatttttttgtatttttagtagagacggggtttcaccatgttcgccaggatggtctcaatctcctgacctcgtgatccacctgcctggcttcccaaagtgctaggattacaagtgtgagccactgtgcccggccttttttttttttttttttttttgagacagagtctcactctgtcagccaggctggagtgcagtggtacaatctcggctcactgcaacctctgcctcctaggttcaagtgattctcctgcctcagtctcccaagttgctaggactacaggtgcctaccaccatgcccggctaatttttttgtatttttagtagagacagggtttcaccatgtcggccaggatggtctcaacctcttgaccttgtgatccacctgcctcggccgcccaaagtgttgggattacaggtgtgagccacagctcccggcctatgttctgttcttgacctaatctaggtcctggctataccctacattcacatgataaaaattccttaaggcatatatttatgattttgttcttgttgttgttgtttgttttggtttttgttttttttgagatggagtcttgctctgtcgcccaggctggagtgcaggggtgtgatctcggctcactgcagcctccacctcctgggttccagcaattctcctgcctcagcctcccaagtagctgggattacaggatgcccagctaatttttgtatttttagtagagacagggtttcaccatgttggtcaggctggtcttgaactcctgacctcaggtgatctgcctgcctcggcctcccaaagtactaggattacaagcataagccaccacacctggccacatttatgaatttatgcattgttttctttactaaaagtgtgctacacttttcttcctttcttcttcttctttgtttgtttttgagacagggtctcactctatcactcaggctggagtacagtggcacaatctccactgactacaaatcccaggcacaagtgatcctctcacttcagcccccctcgagtagctgggattacaggtgtgcaccaccatgcctggctaatttttgtattatgatagagatggggttttgccatgttacccaggctgatctcaaattcctgggcttaagcgatctacccacctcagcctcccaaagtgctgggattacaggcatgagccaccatgctgggccttatgtgtgctatatttaaacaaaagcttctaaaaattaaaaaaaaaattatcctatcttccttccacccctctgtcctgtttagaccttacccacgctgcactgggtgacttcacttctcctacctgccccctctcctacagcccctccgatagaaaacaaccaggaatggccaggcatggtggctcttgcctataatctcagcactttgggaagcccaggtaggaggatcacttaaaaattagatgaggtggcatgcccctgtaatcacagctactcaggaggctgaggcaggaggatcacttgagcctgggagctggaggctgcagtgagctacaatggtaacactgcactccagactggacaaagacaaatacaccctgtctcaagaaaaagaaagaagagagagagagaaagaagaagaggaagaggaagaggaagaagaagaagaggaagaggaagaagaagaagaagaggaagaggaagaagaagaggaagaggaagcagaaggaggaggaggagaaggaggggagggagggaaggaaggaaggaagggagggagggaggaaggaaggacccacacagtggctcacacctgtaatcccagcactttgggaggccaaggtgggaggaccacctgaggtcaggagtttgagaccagcctggccaacatagtgaaaccccatctctagtaacaatacaaaaattagcctggcatggttgtgcatgccttcagtcccagctacttgggaggctgaggcaggagaattgctcgaacccagaaggtggagtttgccctgagccacgatcgtgccacagcactccagcctgggcaacacagcgagactgagtctcaaataaaaaacaaaaaaagagaaaagaaaataaagcaaccaggggaattcctggggcacacaactaagactatgttccttcctgctctaaactctcccatggctccctattacccccaagattagatcaaagtctttattgagactcccaaggactttctctacttcagctctggttgtcttgcagcctgatctctacctgctcttgctgcttctcacatcattaaccttgggccctgaaggtgcagcttccaacttctgggcctttgcacctgcagtcagctttgcataattgcctgactgcccctggcacattcttgttctttgagattcagcttgaatgcctctgctctgggaagcatccctctccttcagaccctccctcccacccctacccggatctaggggcccaggaggctttgggctgggaagattaagaagacgatgatgaataagttggttctagcagttccttccttccttcctttttccttcgttctttctttctttctttttcttctttctttctttcatttttcttttccattaagcatttaacccccttgtacacaattcactctttttaaagaaaaaaactgaggccgggcacagtggctcatgcctgtactcccagcactttgggaggccgaggtgggtgaatcacaaggtgaggagttcaagaccagcctggccaacatagtgaaaccccatctctactaataatacaaaaattagccgggcgtggtggcttgtgcctgtagtcccagctactcgtgagcctgaggcaggagaatcgcttgaacctgtgaggcggaggttgcagcaagctgagatcacgccactgtacactagcctgggcgacagtgtgagacccagtctcaaaaaaaaaaaaaagaaagaaaagaaaaaattgaaatgtaaggctgtgtaagatttgttttgaaactacacagtgtctttttttttttttgtacagttaatgcactactgaatgtgtctttagatagccctgtcctggtggtattttcaacagccactaaccttgcctggtataatatgggggttgtaaattgcaatggaaatttaaagcaggttcttgttggtgcacagcacaaattggttatatatggggatagtaggttttttgggtttttcgtttttttttttttttttttaagactgagtctcgctctgttgcccaggctggagtgcagtggcatgatctcagctcactgcagtctctgcctcccaggttcaagcgattctcctgcctcagcatcctgagtagctgggattacaggcacccgccaccaagcccagctaatttttgtatttttggtagagatggggttttctcatgttggccaggctagtctcaaactcctgacctcaggtgatccgcccaccttggcctcccaaagtgctgggattacaggcacgagcctccgtgcctggcctaggtttcttttctttcttttttcttttttttttttttgtagtcagtgcacacatatcacacatacactggggttttacaaaataagagacaaagctctgagtcaaatgcaaaagtttagatgctcactccatggtcctttcctccagggaagtccccactccctgagccaccccaggggactcctgggctggaaagaactgagaaaccccaggcctcttgctcctccagagttgcagggggacaaggcagaaaccccaaaggtcccgagaccctgagcttggacactgcccctcttttcctgcagcctcttcctgtgtccccagccctgcactcccatcccctcccccaactctgctggcccagccctggcctccctcccgcactcatttccggaggatgccccagcctgttgcagacatgggggaagtccagcctagttggggatgtcacaagggggtggggttagggctatttcttttattttttatttttttatttttttattttttttgagatggagtctcgctctgtcacccaggctggagtgcagtggcaccatctcggctcactgcaacctctgcttcccgggttcaagcaattatcctgccttaacctcccgagtagctgggattacaggcacacgccgccacgcccggctaattttttgtattttagtagagatagggtttcaccgtgttgcccaggctggtatcgaactcctgaactcaggcaatctgcccacctcagcctcccaaagtgctaagattacaggcatgagccaccgtgcccagtcagggctgtcttatgtctagttcatactctaaatgttcagacttgacatgccccagcctatctccagccaccctcctccaccgcccagcccggcagcccacatcctcactgacacggatatcaggcaggcttccttcaagaccgctgtttttgcccgttctcaactagagcccatagccttgctcagacacacaggcttggaaggccactaactcactgccagaccttgggcaagtcgctccacctccctgatcctgcccttctgcatctaaaaagtgaagtattaaaggaaaatgcatctgtctgcacgaaagcagaaacacagctcctaggttctggttccagcggctcacaggctgtgtgactttgggccagtgtcctaacctctctgggcttcggtttcctcacctgtcaaagaggaattaagaggacccacctcacaaggctgttgcaggatcagatgagttcatttcaaatagtgtctgcagcctgagcaacttagtgggaccccatctctaacaaaatttaaaatgtggcatgaacctgtagtcccagctacttgggaggctgaagatggcttgagcctgagagctggaggttgcagtgagctatgattatgccactgtactccagcctgggcaacagagtgagaccctgtcttttttttttttttttttttttttgtgacagagtctcactctatcgcccaggctggagtacagtggcatgagagatgaaacacaccccaaccaggtgtctgccttgcagctgggactagcttctccccatacttcctcctgtctttacccaaggggccttcaactaccgtgcacctcccttctgagcagacaccaaggacatcctgtctccagcccagacacacactctgagcttcctctatgtgcacctcccacagccccctggagatctgcaccttctaacatccaatgccacatcttccctccagatctgctttcaccctgtgctccctgcccagagatgggcaccgagccaggcccgcctgcccagcatagtccaggcctggggggtagaccttcccatcctctgcctccccctcctcccttccctgggtcccccagactccagacaccctcatctcggaaccggactctgttttgctccgttctctccactcacctcccaccctgcagccctggtcactctattttttttttttttgagacggattctcgctctgtcacccaggctggagtgcagtggcgcgatcttggctcactgcaagctccgcctcccgggttcacaccattctcctgccttagcctccggagtagctgggactacaggtgcccaccaccacgcctggctaattttttgtatttttcctagagacggggtgtcaccgtgttagctaggatggtctcgatctcctgacctcgtgatccacccgcctcagcctcccaaagtgctgggattataggcatgagccaccacgcctggcttaatttttatttttatttttttgagatggagttttgctcttgttgcccaggctggactgcagtggtgcgatctcggctcactgcagtctccacctcccaggttcaaccaattctcttgcctcagcctcccgagtagctgggattacaggaaccctccaccatgcctggctaatttttgtatttttagtagagaggaggtttcaccatgttggccaggctagtctcgaactcctgacctcaagtgatctgcctgcctcggcctcccaaagtgttgggattacaggcatgagccactgcacctggccttgttgtttttttgagacagggtcacccatgctggaatgcagtggtaccatcatagcccactgcatcctagaactgtgctcaatcgatcctcccacttcagcctcccaagtagctggggccgaaagcacgtgccgccaggtctggttttgtttgtttgtttttgtagagatggggtctctatgttgcccaggctggtctcaaactcctgcccttaagcaatcctcccacattggcttcccaaagcatgggaattacaggcatgagccacactacaccggcccaacttttgtttcagtggagccccttctctcctccacagctcctcttcacactcacccaccccctcagctgagggacacttcctctttgggatcctactcatgcctcgaacatcctgttctcacccacacctccccatcaaacgcccccagtactgacctggattgaccaaggagcctgttcattagctttggctcactgatcccagaaaagaagccccctctaattaaacacgcacgaaaaccccagaacagaggcaaaaagcattgatgggaaagaactgtatcttctggaaagtaccaatatgacaatgaatccattccatgctgtagttaacaagatgcgggctataatggagattacaagctaactctcaaaaccaaaaaaagaaataattcattgaaaggttttttttttgaagggaaggcatttttttcctctgcaaatttgtatgcaatagtttacatttaactttccagcatgattctagagagtcaatttttggaaaaatgaacacatttaaaaaaaaatgcagccaggcgcagtggctcatgcctgtaatcccagcactttgggaggccgagacgggtgaatcacgaggtcaggagatcgagaccatcctggctaacatggtgaaaacccgtctctagtaaaaatacaaaaaattagccaggcgtggtggcgggcgcctgcagtcccagctactcgggagactgaggcaggagaatggcgtgaatccgggaggcggagcttgcagtgagccgagatcaaaccactgcactccagtctgggcgacagagcgagactctgtctcaaaaaaaaaaaaaaaaatgcttgtaggtagtgtggtttgaattgtgtcctccaaggagatttgttaaagctgggcacgtgtgaatttaaccttatttagaaacagagtctttgcagttgtaaccaagttaagatgaggttatcctggattaaagtgtgatatgatccaatgattgctggccttctaagaaggtcatgcatggcctgacgtggtggcttatgcctgtgtcccatctactcaggaggctgaggcgggaggattatttgaacccaggaggtcctggctgcagtaagctatgatctcaccattgcactccagcctgggccacagagcaagacactatctctgaaaaacaaaacaacagaaagaaaagaaacaaaaagccggccaggtgcagtggctcatgcctgtaatcccagcactttgggaggtgaaggtgggcggatcacaagatcaggagttcgagaccagcctggccaacatggcgaaacctgtctctactaaaaatacaaaaaaaaatgagccgggcatggtggctcgtgcctgtaatcgtagctactcaggaggctgagccaggagaatcccttgaacccaggaggtggagcttgcagtgagccgagatcgcgccactgcactccagcctggatgacagagcaagactctgtctcaaaaaaaaaaaaaaaaaaaaaaagcccttccccacactgaaatacactcaaattattattattattattattattattattattattattattttgagacagagtctcgctctgtcgcccaggctggagtccagtggcgcgatcttggctcactgtaagctccacctcctgggttcacgccattctcctgcctcagcctcccaagtagctgggactacaggcgcgcctgccaccacacctggctaatttttttgtatttttagtagaaatggggtttcaacatgttagcaaggatggtctcgatctcctgaactcgtgatccacccgcctcagcttcccaaagtgctgggattacaggcatgagccaccgcacccggcctcaaattatttttaatttttatttttcttcagacaagagtctcactctgtcacccaggctggagtgcagtggtacaatcacagctcacagctcactccagcattgaactcctggtctcaagcaatgctcccacagcctcccagagtgctgggattacaggtatgagccatggggcttagccgcaaaggctttttttggggtaggtcgggggctgatgtacaactgaatgcacaggaaaggcctttctaagaataaaataaacataaaagtcaccaaagggctgggcatggtggcccaagcctgtaatcccagcactttgggaggctgaggcaggtggatcacctgaggtcaggagttcgaaaccaccctgaccaaaatggtgaactctgtctctactaaaaatgcaaaaattagctgggcatggtggtgcacgcctataatctcagctactcgggaggctgaagcaggagaatctcttgaatccaggaggcagaggctgcaatgagccaagatcacaccactgcactccagcctgggtgacagagcaagactccatctcaaaaaacaacaacaacaaaaaaaaaaaatggaggaagaagattgaagctcacagaataagaagtaatttctttaatactaaaaagagcttctatatatattttaccacagtaaaagtaaagaggctctataaatcaataacaaaaaggctgtcgcctgcagaaaaacaaacaaacaaacaaaaaaaaaacgtttccagggaaagactagaggtccacgtttaaaaatgttttattttaaaggccagacatggtggctcatgggaggctgaggcgggtgaatcacccgaggtcaggagttcgagactagcctggccaacatggtaaatccctgtctctactaaaaatagaaaaaattagctaagcatggtggcgggcacccgtaatcccagctacttgggaggctgaggcaggagaatctcttgaacccggcaggtggaggttgcagtaaactgagatcacaccattgcactccagcctgggtgacagagcaagactccatctcaaaaaaaaaaaaaagttttactttagagacagtgtcttgctctgttgcccagtctagagggcactggtgcaatcatagctcactgcagctgcaaactcctgactcaagtgatcgtcctccctgagcctcctgagtagctgagactacaggcatgagccaccacgtctggacaagatccacttacaaatgtgtatatagaaagacagaaccaggctgggcacagtggctcacacctgtaatcccagcgctttgggaggctgaggcaggtggatcacaaggtcaggagatcgagaccatcttggctaacacggtgaaaccccgtctctactaaaaaaaaaaaatacaaaaaagtagctgggtgtggtggcaggcgcctgtagtcccagctactcgggacgctgaggcaggagaatggcgtgaacctgggaggcggagcttgcagtgagctgagatcgcgccactgctctccagcagcctggacgagagtgcgagactccgtctccaaaaaaaagaaagacagaacctaactatttcccaggctcatctcaaactcctgaccttaagccatcctctggccttgacctcccaaagtgctggaattacaggcatgagccaccgtgcctggctctgagatccagtttttaaacacagagatgttcaacctcactcgaaataataaaaatgcaggccaggcgcggtggctcatgcctgtaatcccagcagtttggaagaccgaggtgggcagatcacctgaggtcaggagttcaagaccatcctggccaacatggtgaaaccccgtctctactaaaaatataaaaattatccgggcatggtggcaggcgcctgtggtgccagctacttgggaggctgaggcaggagaatcgcttgaaccaggcaggtggaggttgcagcgagccgagatcacgccattgcaccccagcctgggggacaagagagagacttcgtctcaaaaaaataaataaataaataaaataaaaaataaaaatgcaaatgagaactacatacttttaaacctctcagttagcaaagattagaatgtttgataacatgtggaggatgagtcctttgtggagaaacctttggcaatagttatccacgatacacctgctcacaccctttgacaagtaattccacttctaggaatttactgatgagatctcttcatgctgggttgacatatgacctctacggcaggttattcaattcatcgttgcttggatcaaaaacaaccgcctagaccaggcgtggtggctcaggtctgtaatcccagcattttgggaggctgaggcggacagaccatctgaggtcaggagttcgagaccagcctgaccaacatggcaaaaccccgtctctactaaaaccacaataattagccgggcttggtggcaggcacctatgatcccacctactggggaggctgagtcgggagaattacttgaactggggaggcagaggttgcagtgagccgagatcgtgccactgcactccagcctgggtgacaagagcaagactctgtctccaaaaatgcaaccaaacaacaacaacaaacaacgaaaatcgcctagtccatcaataggaaactgataagcaaagtctggctcaaccgtggcatcctatgtagccgctaaaaagaacaatatggggacaggtgcactgcctcccacctgtaatcacagcactttgggaggccaaagtgggaggctcacttgaggccacaggtttgagaccagcctgggcaacacagtgagaccccatctctacaaaactttaaaaaattagctggccatgatagtgcacactgtagtcccagctacccaggaggctgaggtgggaggatcacttgagcccaggaggtcgaggctgcagtgagctatgatcacaccactgcactccagcctgggcgaaagaatgagaccctatctctgaaagaaaagaaaaagaaaaacaaaacgaaacagaaaaagagcaaagtggttcccaaagtatgcatatatcaaaagatcacactgtacctggtaagtatatacaattaatatttgtcaaataaaagaagaacaagatggtgagaactgctgaactctgtgaatggatcaaaaaccttcgacttgaaaacttgaaataggcaaactggatggtatgaaaattatatctctaaagctgttaccaagcaacacaaagtaaaacactcagtttcccaagaaagaaaaaggcaggaaggagacccccatctctacagaaaataaataaatacataaatgagctaggtgtagtggtgcatgcctgtagtcccagctattctagaggctgaggcaggaggatcacttgagcccaggagttgtggaggcttctgtgagctatgattgtgccactgccctccagcctgggtgacagagggagatcctgtctcaaaaaaagaggccgggcgcggcggctcacaccagtaatcccagcactttgggaggcggaggtgggtggatcacaaggtcaggagatcgagaccatcctggctaacacagtgaaactccgtctctactaaaaatacaaacaattagctgggcgtggtggtggacgcctgtagtcccagctactcgggaggctgaggcaggagaatggcgtgaacctgggaggcagagcttgcagtgagccgagatcacgccactgcactccagcctggcgacagagtgagactccgtctcaaaaaaaaaaaaaaagcaagcaagaaagagggagatagagagggaaggaaggcaggaaggaaggacaaaaagaaggaaagaaagaaaacaggaattcagagggaaagggtggggagggaggtgagggataaaagaccatatatcggccaggcgcggttgctcctgcctgtaatcccaacactttgggaggccgaggcgggtggatcacctgaggttgggagttcaacaccagcctgaccaacatggagaaaccccgtctctactaaaaatacaaaaaaaattagccaggtgtggtggcgcttgcctgtaatcccagctactcaggaggctgaggtaggagaatcacttgagccccggaggcggaggttgcagtgagcagagatggcgccactgtactccagcctgggcaacaagagtgaaaccccatctcaaaacacacacacacacatatcgggtacagtgtatactgctcaggtgacgggtgcaccaaagtctcagaaatcaccactaatcaattctttagtggttatttggccatgtagccaaaaaccacctgtaccccaaaaactattgaaatgttttttagaaaggatattttgacacaaagagaaaaaaacccaactgcttccagggttaccctaaagtcctccccatcgagtctaggagaggggatggtgtcttaaataggcgagtgctggcacaggggcgcttgtggtagctgtgtgaccttgggcaagtcatctcacctcttggtgttgtacttgagcgagttagagaaaacgccacactttgagacgaattaagagtccgtttatttagctggcggccaagagacggctaacgtttaaagttttcttggccttgaagaagggactagattttcttttatactttggtttagaaaggggagggggggtctagttaaaacaattttacagaagtaaagtaggcaaaaaagctaaaaggataaatggttataggaaagtaaacagttctaggtgcaggggctttaagactattgcaaggtgatagacgcggggctttgggcgttatcaatcagacgaattcctgggaactgcagatattgctcgccccagtatcttatcgattaattgcattcttggatgtgctgggagtcagcttgcacaagttaagtctttgaggaagaggctgctagtgaaagagccaagatggagtctgtctggctctcttagctaagggagagtcaattcaggtggaaacaaggctaggtgattaaaggaaagggagagtctaaaaacagggttagtaaaaacaaggttgggcattacattggtagggtgaccaagcgtcatggtttgcttgggactgtcctgacattagccctaaaaattccatgtcatgcgcatccatgtgaagagaccgccaaacaggctttgtgtgagcagtaaagcttttcaatcacctgggtgcaggcgggctgagtccaaaaaaggagtcagcgaaggaagatggggtgaggctgttttataggatttgggtaggtagtggaaaactacagtcaaaggggtttgttctctggtaggcaggggcggaggtcacaaggtgctcagtgggggagcttctgagccaggagaaggaatttcacaaggtaatgtcatcagttaaggcaggaaccaggcattttcacttcttttgtgattcttcagttgcttcaggccatctagaaatacacgtgcaggcttggactcggaggcttgacattctgtgttgcaggaaattcctcagtccccagaacgtgggatagctggtgacaatgcagctggctccaggttttgtttttgtggttttgtccttttttttttttttttttttgagatggagtctcactttgtcacccaggctggagggcagtggtgcgatctcactgcaacctccgcctcctgggttcaagcgattctcctgcctcagcctcctgggtagctgggattacaggcatgagtcaccgtgcccggccaaggtttttcttctttgctgaatggagataatggcaggcagagctaggttaaaagcacctcctcccagttcatccaccttgtggctgtgtggctttgtgtagcttcctgcaccactctgggctcatctctaaaatgggatttttctttttttttttttctttgagacagggtctcgctctattacccgggctggagtgcagtggcgcaatcatggctcactgcagcctcgacctcctggactcaagtaatcctcctgactcagccttccaagtagctaggactacaggtacatgccagctaattcttaaaattctttaggctgggcgtggtggctcatgcctgtaatcccagaactttgggaggcgggcggactacctgaggtcaggagtttgagaccagcctggccaacatggtgaaaccccatctctactaaaaatacaaaaattagccaggcatggtggtgcacccctgtgatcccagctgctcctgaggcagtagaatcgcttgaacccaggaggcagaggttgcactccagcctgggtaaccaagtgagactccgtttcaaaaaagaaaaaaatgaaaaacctcttgggctcaagcgatcttcccaccttggcctcccaaagtgctgggactacaaggcttgagccatcacagctggcctaaaatgggaagtttaagtgcacctgcttcacagagagggccggtcatatccatctttttacatcactttgcacaggccctggcactgaccaggttgtcactgctccaggacaaggtttgccactgccctctcctcacccagggttctagggctgtgattccactcaaccactaggaacctcaggtgggtgcagggcctggcttggcaggagacatcatcaatgagaaccggttagcctgcttgctggactcatgctgggttgccaagtgccctgggaagctgggcaggggacaggtggcaggtgggagagatcaggtgccaagtacctattcgggtagatgaggatatttaggcatggagcaggggggacccttggagaaaggcgagcagaggaggtggccctcactgccaccactagcctcccctcatcgcctgagttctggtaattttacctctaaagccccctggaatccctccctcttctcctattcatcacccccgaaccaggccccaggtcctcccatccagctgcccacggtagagtgacaccttcccagcctcccactctgttctttcctaattttaagtccaattgttggccaggtgcattgactcatgcccataatcccttgagggatcactcgaggtcaggagttcaagaccagcctctccaacatggtgaaaccccgtctctacaaaaaatacaaaaattagccgggcgtggtggtgtgcgcctgtaatcccagctactcgggaggccaaggcaggagaatcacttgaacctaggaggcagaggttgcagtgagctgagatcgtgccactgcactccagcctggatgacagagtgagactccatctcaaaataaatcagtaagtccattggtgcctctccctggagagaacccaggagggcttattgtggctgggccagccctgctgtcctcccaggaaacttcctctcagtatagttcccccacccgctcatttctcagggctcagatgtcacctcttccaggaagcctgccttgaacacccactcactctcaagcttggggtccggcctgagctccatggtcagggatcggggtggaaggtgaggacaggcgagaagctgcccaactgcagaaggtgcagcctgggtcccttcctgcctggctgaccccaggtgtcttcctccagcttcccaacctttgccccatgtggtaccttccacctgaaatctctctccagccctggcctgcccaggtcctcttttgagctcccctactccacttctccggagtcctggggcttctccactggggcgtggactccaccattccaccatgtatcctgtattatattatcgttattgtttgtagataccggggtctcactatgttgcccaggctggtgtctcttttttttttttttaattgagacaggatctcactctgttgcccaggctggagttcagtggcatgatcatagttcacctcagccttgacttctgggctcaagtgatcctcccacttcagccttctgagtagctgggactataggagcacaccaccacgcttggctaatttttgtatttttggtagagatggggctcttgccatgttaccgaggcttgtctcaaactcctgagctccagcaatccactcacctcagccttccaaagtgctaggattacaggtgtgagcgaccaagcccggtcatatattattattaatacaaacaaatgccatgctctgagcaccctggagtatgcgacatgtgatattcaataactccctagtcacaacaactgagaagagttgctttattatctttcttttccaggtgtgcaaacaagctcttggagggaaggagaggagaaaataaacaggtgaatatggtgggggtggggtaaagcaggcaatggaggaaggaggaggggactgaggctcagggagaagtatgtatgcatttgaaaagggaaagaggctggggcacagtggctcttgcctgtaatcccagcaccttggaaagcggaggcggaaggatcacttgagcctaagcgttccagaccagcctgggcaacatagcaagaccccacctctaccaaagtttttttttttgttttttttaattgagacagagtcttgctctgtcacccaggctggagtgcagcggcacgattttgactcactgcaacctccgcctcctgggttcaagtgattctcctgcctcagactctcgagtagctgggattacaggtgcgcaacaccatgcccagctaactttggtatttttagtagagaaggggtttcgccatattggccaggctggtctcgaactcctgacctcacgtgatccacctgcctcggcctcccaaagtgctgggattacaggcatgagccaccacaccctgcctaccaaagtttttttatttaaaacaaaaaaaaattagccgggcatggtggcaggcatctatagtcctagctcctctggaggctgaggtgagaggactgcttgagccctggagtcccaggctgcaatgagctgggatcatgacattccattctagcctgggcaacagagtgagactcccatctttaacgaaattttttttgatagagtctcactctgttgtccaggctggagtgcagtggcacgatctccacgcactgcaacctctgcctcctgggttcacgtaattctactccaggctaatttttgtgtttttagtagagatgggattttgccacgttggccaggctggtctcaaactcctgacctcaggtgatccacccgcctcagcctcccaaagtgctgggattacaggtgtgagccaccgcacccagcctctaacagatttttttaaaaaaagaaaagagaaggtcgggcatgctggctcacgcctgtaatcccagcactttgggaagccaaggctggtggatcacgaggtcaggagtttgagatcagtctggccaacattgtgaaacccccgtctctccaaaaaaaaaaatatatatatatataaattagccgggtgttgtgggcgcctgtaatcctagctactcgggaggctgaggcaggagaatcgaatgaaaccaggatgcagaagttgcagtgagccgagatcatgccattgcagtccagcccgggccacaatgcaagactccgtctcaaaaaaaaaaaaagaaaaagaaaaaagaaaagagaaacagtgtagcagagggaaggccaagtgcaaacgccaggagtctgaacttggagggacaggttcttccacacttgcaacagaggtctcctgcctccctgaccgccccgccccccgcgcccctgtctgtgtgaggaaatcaaatctcagcttgcctagggccctgtggcagggaggccccaacttcaccccatgggtcttgggtctgctgagctgagtcagagaaaggtttattatccccattttacagaggcttattgtccaaaggcgaagccacttgcccagagtacatgcggtgggccagcgactatgaaaacccctggggctgtcctctgttcagggatcgcccaggctccctgcccctgcgcgctgctgagactgggtcattttcggttctaccaggcaagcgggggacccagcccccactgctgctgccctcagccaaaaccagggctgcgccaccacccacccggcctatctcccatcttatctccccagctctgtcgcctgacccctgcaccccaccaaatcgcagcctttgcccggtgccctcaccgcctcggttggcccccgcgcgcgcctcgggcgaacccctggactggccctccaacagggccccagactcggggtacccagggtggccgctgaggcctggagaaatctgggcctcccctgtgcaccatccaactgcgcgccccagaggctcagggcgccccgggagtgtgggggtgtggacagatgagcagagccagagcatctcgggcagaagaggggacctgggagggggccggggagacagacagcgaacaggggtgaagccggggccggacggagcgcgcagcggacaatactgggttcaaaggggagagataaggcgcagactagaaacgctaggctggacccgggccaggcgcgccgcggggcagagatgggcggagcgggaacgggggcgggggcgagaatgggggggcggggacgggggcggggatggggtgcgggtgcggggtcgggggccagggagaggcctagttgcgtcgaggggggcaagcgcctggaggacccggcgcccgctccaggccctgcccctccaagtcccccgccccgcgccaggccccgcctctccagggccccagccccgcgccaggccccaccgttccggggcgcgtgccccgcccaggccccgcccccacggccccgccccgggctccccccactcaagccttttttcccctgctgggggccgaggcccggccaggagcagagtccggctgcctggggcgggcggcgcgtgtctgcagctgctccgggtagcccgctaggcgcgccgtccccagccccgccgccggccctcggtgcgcccggccgcctgcacccccaggtaagcgagcaccccgcgccgcgaacaccgccccgaacgccaccctcacggcggtccccggccccgcctccgcggccatggcggccccagcccggcccccactcgcagctgggctccagcccccatcaccccgccggggactgtccccctcggggcttcccatcatggccgtctccccgagctatccgcgctcccccacgagggccggggcgcaacgggtgcccgaggacgcggctgtgaaacgggctggagcgagtaggggcgatcctggcctcgtgacgcgggggaatccggatgtgtgagccgggggagcgccccgtttccccgacgtgccagggctggggacgcagctggggccctggcctcggagtccgcagcccggccgcgtagacggcttctgagaaccgcttaaacacgtcattccaagcccgagctaacccatcaggcggccggggtgaggtggaggtgcccaggcggggataatgtcatttggcctggttggaccagccagcgagggctttttaggcccagggcctagccgggagtgtgtgcggagcagaaaagaggccagcctggctgaaacgcggagagggagggtctgaggtggagagaggttggccggggcctgggaagcggcgaggagagtgtggaacccgttctcggggcggtggggaccagggaggcttggaacagcaggtgcatggcgtgatcggattgtgtcttaagaacatcccgtagccgctgtgggtaggagagatggggatacttggaagggggcttctggcttgacctggctggaaggtgtgataggaagtgggtgaactgaaaattcgctttggcagagtaacatcgtctaattctgtctgtttgcaagtggagcgtgggggaccgatgtttctcctgggtagttaggagtatatagaagaggctttcattgctgggttgggagacttgaggagaagctgctctgggggacacaggaaggtgggcagggggagaggctgttgtggtttgcaaaacctaccagatgggggaatgctcccatcgactccagtctgagctcaggcaaggtctcaggcatctgagcgcagaggccagggtgaccccactggggcgacctgggtctgttatatggggatagggttcctggactgtggaattgtctttgaagccctcggcctcccccagcctcaaatgggtctgccttccaggagcagctgctgtgaataaacacagaagtggagctgggggactgattagaagcctcattcagtgcacctgggccccagcaggcccagccaggcgtggaggaagaggcattgaggactttccttacctgtttttccagctcacccactgccagcagaggtactttgagcctggggtgtggggggtggggggcggccttggtcgttgaactggctgtagggcccccagggaaaggtttctgagcttcagtttacccatctgtaaaatgggtcagtagtatctgagcctgggagtgttcatggatcgatgaaagccgaggctaggcagatctcggtggcagccacacccctaaggaaccggagagggttctaacgcccggtgggagttcagggggatgtatgggcttccatttctcctctgagaaattcacaacagtgtccacctcctgacccagggctgtctgcaggttgaataaagcggttgacccagtgcgtggcacagaatgtcttggctcaggagccactgggatgcctgtagttggcagcagaagtgggcccaggttccctcctcccacccgtgggatggcacagaaaggcaggtgccttgggagctcgctgccctgtccccttctctgagcaccacaagcttctccctttccgactggctgggcttgagcctgaccaccccccagccctgtcctgccactttgagttgagggcctccgggctactgacttcaccacttcctgcttcagtttctccacctgtaaaatgggataatagcagtcatgacctataggtaaagagctgaacacagtgcctggctggttgtgaatacgtgctaaacaggctattaaaatatcacgagaatatcacagagctggaggctattaaaatatcacggaggggctgggcgtggtggctcacgcctgtaatcccagcactttgggaagctgaggcaggcagatcacctaaggtcaggagttcgagagcagcctggccaacatggtgaaaccccatctctactagaaatacaaaaattagccgggcgtggtggcatgtacctgtaatctcagctgcatgggagactgaggcaggagaatctcttgaacctgggaggcagaatttgcagtgagccgagatcgcgccactgcactccagcctgggcaacaaagtgagactatctccaaaaaaaaaaaaaaaaaaaaaaattcagagtcatgcctggggtcagggggagtccagaggagtcacctgactcagcctaaggaggagtcagggaaggcctcctggaggaggtgacagttggctgggtcgctaagggtaaggaggagttaaccaggccaagagaccagtgggcaaattgcagaggagagaaactgccagggtgcttggatgaaacaaccacaaagccagggttgtaagatccagaagaggggagaggaagaagggcagagccagcctgccagccttgaacaagcatttggcattatttagagctcagggaacagactgcaggggtcgaaggcaggagcctggagaccaggatggaagggactgcaccaggccaggggagtaatggtggggctggaccaggtgaaggcgtggacgggtgagacttgggtggatcttggagagatatggagaggccgggggagggagcagctgctcatgggggagaagctttaggtgtaagtcagcaatctgttctcagcatctggaaattgccatgctgctagacacccaggtggtacggcgtaggatgggctttaaagcaagctgggagcttgggagacagcagaaagagggcagaaggaaaaccaggagtgggtggcaagctgggagccaagggagctggggctgtcataggaggaaagggtcttgaaacccctgtttgataattcagtagcaggcatcttactgtttttttaattattattttttttattttttggaatggagtttcgttcttgtcgcccaggctggagtgcaatggtgcgatctcggcccactgcaacctccacctcccgggttcaagcaattctcctgcctcagcctcctgagtagctgggattacaggtgcgaaccaccacacctggctaatttttatattattagtagagatgaaggggggtgggtttcaccatgttggccaggctggtctcgaactcctgacctcaggtgatgcacctgcctcggcctcccaaagtgctgggattacaggtgtgagccactgcgcccagcccgtctcactttcttttgtggctgctctttaccaaccctgttctgttccccatgcctttcagtacaagctcttttctttgcttttctttcttgtttttgttttgttttttcaagacaagttctggctctgttgcccaggctggggtgcagtggtgcgatcttcgcccactgcaacctccacctcccaagtttaagcaatcagcctgggactacaggcataagccaccacacctggctaatttttgcatttttttgtagtgattttgtagagttttgccagttgcccaggctggtctgaaactattgagctcaaacgcctcagcctcctaaagtactgggattacaggcatgagccactgcactcggcctctttctttctttcaaaggcagaatcttgctctgtcgctcaggttggagtgcagtggcatgatcataactcactgcagcctcgacctcctgagctcaacctcagcctcctgagagctgggaccacaggcatgcaccaccaggcctagctaatccttaaaaaaaaattttatacacatggacaggggtcttactatgttgcccgggctggtcttgaactcctggcctcaagcgagcctccagcctcaacctcccaaagcactaggattataggcatgagccactgtgcctggccaagcgcaggcttttctttgccatccttgaataggcccctcagacccatcatggctctgaccagagtagcatagagaggcccggcgcggtggctcacgcctgtaatcccagcactttgagaggccgaggcgggcagatcacctgaggtcaggagttcgagaccagcctggccaatatagtgaaaccccgtctctactaaaaatataaaaattaaccctgtgtggtggcatgctcctgtaatcccagctacttgggaggttgagacaggagaattgcttgaacccaggaggcagaggttgcagtgagccaagatcgcactactgcactactgcactccagcctgggtgacagagcaagacactgtctcaaaaacaaacaaacaaaaaacagagtagcatagaagagaccttcccctccctgagtctggactttatacctttgttaataggatgctgtcacacacacacacactgaaccgcctggagctcagctcagctttccctccctaccccctcctggactcccagagacagattttaatccagggtcccatgacactgtgtctgaagagtgatcatttcctatcagctatgccctggggaccccttctgccctgtgcctggccccactttcctcccacccctgtctgtctgtctgtctgtcatttgttcattcagcacagacttaggaagtgtctgcagtgggaggcactggggacagacagccacaggaagccttacggagctgatgtccccgcagggagaaggtgatggggacaaggatgaggcttgaaggagcagctagacatctggaggaagagtgctccgggcagaaggcccagcaggtgcaaaggccctgaggctggaacaggcatggtgtgttggaggaatgcaatgaggctggggtggctggagcaaactaagcaaggagtcatagagtagagagaggagtagatgaagagactgaaggtccttgggaacccccagtccaaccacagcataccctggagagtccttgctcaaggggacttgaggagtgaaaggttatgggaccctactgcttttgcacggttactttgtcgtcctgtatgtgcagtggtcacctgtgctggggtgctcgaaccttgaaggctgaggaagctggcaggaggaaggagaggaggactacgcagtggccaagacttctcctcctcccctccacacaatggggctcagctgaactgggagagggaagtagccagggaagggtactgatgagcgtatggaagcagaggagatgaagggcagtggggaggaggtgggaggggaggaggaagaggaaagggaggaagacgagggggaggagagggaggagggggaggaggagaaaaaggaagaggagggggaggagagggaggaggaggaggagaaaaaggaagaggagggggaggacgaggaggaagaagcaacggcagcagccagtgggcaagcagccagagctggatggaggagccaggacgttctcagataggtgatgggggagccctagggatgcagggatggtagcctcgatcaggggcctagaggacaaacagcaaaagccaagcagcagggccaggcgcggtggctcacacctgtgatcccagcactttgggaggccgatgtgggtggatcgcctgaggtcaagagttcgagaccagcgtggccaacatggcgaaaccctgtctctactaaaaatacaaaaattagccaggtgcagcggtgtgtgcctgtagtcccagctactcaggaggctgaggcaggagaattgcttgaaccaggggggcggaggttgcagtgagcagagatcacaccactgcactccagcctgtgcaacagagcaagactctgtctcaaaaaaaaaaaaacaaaaaacaagcagcgggtgtgtctgggggatgggccagcctctagcctgcagtcgctcccttcccaggcaaaagagagagaactcggtcccctctccctgtaccccacaagagcctgggcaccctccccactcccaccacgaacctgggcttcactgggagggaatttagacacttggatgctggagcctagatctgaggttctgttgagccacggcactgtgacccggactgtcccctccatccccgtccaaactgggagggggcatcccttgtccctggcactcctctgtgatctggcaggtgtgatgagccacagcagggacaggggaataggggctgggctttttagggtgatggcacccagacggtaacaggacgggagggaggtggtcctctgggttttgtttctccatctgggatgttggtgagggcaggcataagccacctctctgtgcctcgagtccaggatgcctggccctgcctcagggcctttgcactggctcttccccctttctagaatgttctatcatcagggtttcctccctcacctccctaccttctcagggagggcttcctgacctccctctttaaaattgtagccctgccaggcaccgtggctcacacctgtaatcccagcactttgggagcctgaggtgggcagatcacctgaggccaggagttcaagaccagcctggccaacaaggtgaaaccccgtctctactaaaaatgcaaagattagccaggcgtggtggtgggcgcctgtaatcccagctgcttgggaggctgaggcaggagaatcacttgaacctgggagatggaggttgcagtgagctgagatggtggcactgcattccagcctgggcgacagagagagattttgtcttggaaaaaaaaaaaaaaagaaaattacagcccccactgcctgactcctcattccttttcctgccttatttttctctccacctgacaataacaaaacaaacaaattatcaaaatgcagggccagatcaggtggctcatgcctgtaatcccagcactttgagaggcaagttgggcagatcacttgagcccaggagttcaagaccagcctgggcaacatagcaagaccccatttctgaaaaaaaattaagatatagagtctttgccactccctcatctccaccatgtccagaatattggctccatggagtgaaatttcttgtctactctgttctctgctgggatcccagtgtgtagttggtatgcagtgggcacccgataaatgtgaagtgatgtcagccatcctgggtccttatggctgcagcctgagaggttggacttggggggcggatggcgttgggggtagcgtacctcgggtggcaggtaacaggcaggttctggagacaggcaggcttgggtccaagtcccagactctactccctactttatgactttggatgactccatgcctcactttccccagttgcaaagtacagatgacagagggacctggcacttaacacatgtcagcttcccggggaccttgctggagtctggaaggagctgggggccaatctgaggcctccagagggtcagactctgagacaggacatttatgactttcccacccactcctagaattttccagaaatgtgatgaagagcaaggagacgttactttattttgggcagtcaggacccctctgaaaaggcgacattagggctggggcctgagtgggagtgagtgatgggctgagacaggaattggacttgtttactgccctcccagagacccctcattcagtggggagacagacgtgtctttgggcagttacaaggcagattaaccagggtacaaggaaaacaatcagagacactgaaggcaaggagaggctcgttttttaatttttttttgagacagagtctcgctctgtcgctcaggctggagtgcagtggcgcaatctcggttcactgcaatctccgcctcccgagttcaagcgatcctcctgcatcagcttcctgagtagctgggattacaggtgtccactaccacacctggctaatgtttttttttttttttttgagatggagtctcgctctttcacccaggctggagtgcagtgactccatctcggctcactgcaagctccgcctcccgggttcatgtcattctcctgcctcagcctccccagtagctgggactacaggtgcccaccaccacgcctggctattttttttgtatttttagtagagacggggtttcaccctgttagccaggatggtctcgatctcctgacctcgtgatccgcccgcctcggcctcccaaagtgttgggattacaggcgtgagccaccgcacctggctaatttttgtattcttttgtagagacggggttttgccatgctggccagactggtctcgaactcctgatctcaagtgatctgcccgcctcatcctcccaaagtgctgggatctacatttggccttctttttgtttttgcttttattttgagacagagtctcactctgtcgcccaggttggagtgcagtggtgcaatcttggctcactgcaacctttgcctcccgggttcaagcgattctactgcctcagcctcccaagtaactgggattacaggcacgtgccaccatacccagctaatttttgtatttttagtagagatgaggtttcaccatattggccaggctggtcttgaactcctgacctcaggtgatctgcccaccttggcctcccaaagcactgggattacaggtatgagccactgtgcatgaccaaggagaggctcttgacccaggctgggagtcttcaagacttcctggaggcagccacaggcaagctgcccacttgaaggtttaaccatgccaggcatcagataacggaatgctgaacagtgatttagagggagcggcccaggcaaaggcctggcatccgggaatggcatcggagcaacattcctaaaattgaagcagactctgggaatccacccgtggagaccctaggctgagaacctcggagtcagggtggctgcgggagggcagacagggaggccaggacagggcagtgcgttcggccaggtcacaaaggcctcgaatgccaggtcaggagccatggggagcctccgaggagatcttgagatggggaagggacaggctggtactcagagccactgctgagagagggatggactccatctgtgtgtatcccagaggaggggcggtcctggaccgtcatctgagaggaagtgctttgcctccagttacacaaacacctccggtccttaaagggacgataggtagcctctgcctccccactgggggcccttctctgtgccaacccatccaacccagagggctgatggaagacgtgtgctctgcaggggctctctgtggcttcttgcttcactgggtggatgggtatcaagatggtgacttgaggccgggagccgtggctcatgcctgtaatcccagcactttgggaggccgaggcgggaggatcacttgaggccaggagttcgagaccagcctggccaacgtggtaaaaccccatctctactaaaaatacaaaaattagctgggcatggtggcgggcgcctgtattcccagcgacttgggaggctgaggcaggagaatcacttgaacccaggaggcggaggttgccgtgagcctagatcgtgccattgtactctagcctgggtgacagagcgagacttcatctcccgcaaaaaaaggtggtgacttgatttcacagagaactccagctgcctgagccaccctgcaggataggagcaggctctgaggtccacagtttgctactgtctcaacccactgcccccagctcctctgagacccaggcaggactgcaggcccatgtaggttcagatggatgcctggaggccggacacggtggcttgcacctgtcatcccaacactttgagaggctgaggctcaagtatggcttgaggccaggagttcgagacaagcctgggcaacatagtaagaccctatctctataaaaaatatatattttaaaattagctgggtgagggctgggcacagtggcttatgcctgtaatcccagcactctgggaggccaaggcggatggatcacctgaggtcaggagtttgagaccagcctgaccaacatggtgaaatcccgtctctactaaaaatacaaaaaaattagccaggtgtggtggcacatacctgtaactccagctactcaggaggctgaggcagaaaaatcgcttgaacccgggaggtggaggttgcaatgagctaagactgtgcttctgcactccagcctgggcaacaagagcgaaactctgtttcaaaaaaaaaaaattagctgggtatagtggcatgggtgcctgtagtctcagctattcaggaggctgaggcagggggatcatttgaacccaagagtttgaggctgcagtgagctatgatcatgccactgcactccagcctgggcaacagagtggaatcctgttgtctcttaaaaaaaaaaaatttgttaagtggatacatacctggggaccctggagctccacggctgctgccctcaccctgttgttttcctccctctcggatgatgccatcttagaattccatgcctggaatttgcccaccggctctcctcgccccctcccacccctcggctgtgtgtccccttattcctgcccaagcaggcagttcccagatctaccccagatactcatcccaatctgccacccccaccccttgaagataccctacccggacctcagcacccctccccgaggctcctgtctctgccaccctccaccttcagcctccctctctcttcttttctggagacagcaccatgctctgttacccaggctggagtgcagtggtgcgatctcggctcactacaatctccacctcgcaggttcaagtgattctcttgcctcagcctcctgagcagctgggattacaggcatgtgccaccatgcccaggtaatttttatatttttagtagaaatggggtttcaccatgttggccaggctgatctggaactcctggcctcaggtgatctgcccgcctcggcctcccaaagtactgggaatacaggcatgagccaccgcgtccggctgagcctccctacctgttctgacccagcttccccactctggctgctgtcacctgcaagaggccagccagcctctgagtgacctccagggatgggacaacctccaagggcagcctgtgttgccaggagaactcccagaatcggtccctcccgaaatctctgccgccttcccatggcatcaaggctgagggcttctgttaccactgctgttttgtgtttttttttttgttttttttttgagacggagtctcgctctgtcacccgggctggagtacagtggtgcaacctcggctcactgcaagctctgcctcctgggttcatgccgttctcctgcctcagcctcccgagtagctgggactataggcgcccgccacggtgcctggctaatttttttgtattttttttagtagagacggggtttcaccctgttagccaggatggtctcgatctcctgaccttgtgatctgcccgcctcggcctcccaaagtgctgggattacaggcgtgagccactgtgcccggcctgtgtatttttttttttttttttaaacagagacagggtctcgctatgttgctcaggctggtcttgaactgctaggctcaagcaatcctcccaccccagcctcccaaagtattggaattacaggtgtgagccactgtacctggttctgctgctgtgtccttcaaggcatggtaacagacacttggtaacctccccttgaatctggagtgcccgagggcctgggctggcagccttgccaacatcgggaactggtcaagactgcactttgttttgtgttcattgtatttgttttcacggctagcctctgcacgtgatgccaatgctggcttgctctttcagggagagagggagggagagaaagtgtcttctgaaaataaatgtatttcggtaaacaaacaatgtgagccttttaacttttttttttcttattttttttttttgagacggaatcttgctctgtcacccatgctggagtgcagtggcacgatcttggctcactgtaacctccacctcccaggttcaagcgattctcctgcctcggcctcccaagtagctgggattaccatgcccagctaatttttttgtattattagtagagacgaggcttcaccatgctgaggtcgaactcatgacctcaagtgatccgccctcctcagcctaccaaagtgctgggattacaggcatgagccaccacacccagcctaaaattttattttatatttacttactgacttatttatttttttatgtttttttttttttttttttttttttttgagacagaggcttgctctgtcgcccaggctggagtgcagtggcatgatcgtggctcactgcaagctccgcctcccgggttcacgccattctcctgcctcagcctcccagtagctgggactacaggtgcctgccatcacgcccagctaattttttgtatttttagtagagacggggtttcaccgtattagcaaggatggtctcaatctcctgatctcgtgatccacccgcctcagcctcccaaagtgctgggattacaggcgtaagccaccgcgcccggccctatttatttttttttgagatggagtctcgctctgtcacccagactggagtgcagtggcgcaatctcggatcactgcaacctcggcctcccgggttcaaacgattctcctgtctcagcctcctgagtagctgggattacaggcacccaccatcatgcccagctaatttttgtatttttttgtagagatggggtttcaccatgttggccaggctggtcttgaactcctgacctcaggtgatcctcttgcttcagcctccgagaagtgctgggattacaggcgtgagtcactgtgcctggccagcatgagccttttttatttatttatttttgtttttgagacggagttttgctcttgttgcccaggctagagtacaatggtgtgatcttggctcacggcaacctccgcctcctgggttcaagcaattctcctgcttcagcctcccgagtagctgggattacaggcatgcgccaccacacctggctaattttgtatttttggtagagacggggtttctccatgttggtcaggcggatcttgaactcctgacctcagatgatccacccgcctcggcctcccaaaatgctgagattacaggtgtcagccactgtgcctggccagcacgagccttttgaaggagagcagtgagtgcctcacagcacaggtggaagacggacaggtggccatgagggtggtgggaaagcctgaaactggagcttggttgttctctggaatcctgggtgcccggtctcagttgagccttttactcatttgtgcagtcggtggacagtttcctgctacccgttgtgtgtcaggtgctgggaaaatggagaggtcctaatcaccaggatatgggggaagatagttgtccctggctgggtgcagtggctcacatctatagtcccagcactttgggaggttgaggtgggaggatcacttgaggccaggagtttgagaccagcctgggcaacatagggaaaccctgtctctgccaaaaaaaaaaattagctgggcatggcggcatgtacctgtaatcccagcactttgggatcctgttgaggcatcaggatcacttgaacccaggagtttgagactagcctgggaaacatagtgagacctggtctctacaaaaaaattttcttttttaattggccgggccgggtgcagtggttcatgcctgtaatcccagcactttgggaggctgagaggtgggaggatcacttgagctcaggagtccaagaccagcctgaccaacatgttgaaaccctgtctctactaaaaaaatacaaaagtagctgggcatggttgcacacgcctgtaatcccagctacttgtgagactgaggcaggagaatcacttgaacctgggaggcggaggttgcagggagctaagattgcaccattgtgctccagcctaggcaacaagagagaaactctgtctaaaaaaacaaagacaaaattagccgggcgtggcagtgcacgcctataatcccagctactcagaaagctgaggtgggaggatcacttgagcctgggaggtcgaaactgcagtgaaccttgatcatgccactgcactccagcctgggcaacaaagcaagaccctgtctcaaaaacaaaaacacaaaaaacagttgcccgtggctgggtgcagtggctcatgcctgtaatcccagcactttgggagaccgaggcgggcggatcatttgaaatcaggagttcgagaccagcctgaccaacatggtaaaaccccgtctctactaaaaatacaaaaaaaattagccgggcatcatggtgcgtgtctgtagtcccagatacttgggaggctgaggcaggagaattgcttgaacctgggaggtggagggtgcagtgagctgagatcacaccactgcactccatccagcctgggtgacagcaagactccgtctttaaaaaaaaaaaaaaaaaaaaaaggccaggcacggtggcccatgcctgtaatcccagcactttgggaggccaaggcgggcggatcacgaggtcaggggttcgagaccagcctgaccaacatggtgaaaccctgtctctactaaaaatacaataattagccgggtgtggtggcacgcgcttgtaatcccagctactcaggaggctgaggcaggagaatcgcttgaacctgggaggcggagattgcggtgagtagagattgtgccactgcactccagcctgggtgacagagcgagactccatcgcaaaaaaaaaaaaaaaaaaattgttgccccaaaagttctgagaaagatgaggtaggagaacccaggaggggagtgtcccctaacccagcccagcggcgattggtcggccctcctagaggaagtgtctgttgaacagagtcgtgaagagctgggaggaatttggcaggctgaagggagggcattactggtagggaatggcatgtgccaaggtccatttgctggggagcaccgtgccaggccagtgggagcacttgcaggattcaaagctgcgggtctgatttgcaggcaagaagaaagacctgggtgctgagtggggaggcggccaccatgattcaatcaagaaatgggagccgtggaaatcgggcagaggagggactgtcgcgggaaagacggacgtaatcgtagggcttaatgaggagctgagtgccgagagggtgtgagatggagtcagagatgactctcagaattttgtccctgaagactgggtggagggtgggatcttggccaagaagccaggggaggaggaaagaaggctctgtgggagatgacttcagccctgacgtgtctggacagcgcgcagacgggaggtattggggcagcaggtttggctttggcgggatggtgacctgggagcagcagaaatctggaaactgacagcatggacgtgctggccgcagcttccaggcaggtgaatttcccagggagagcagatggtgtgaggggatccaggactggcataatttagggagaaaaaccagcacaaattagagaaaacagcagagaggaggggaaccaggaggtcatgattctgggaaggagggatggacaaggggaggagatgctactagagggtcccagtttcatgcttagaggaattgaccacttgggattggccatgggaggctgcgactgatggccaaaagccaaaggctggagtagtagggtggggacagagaggtggcagtggacagtgaatagaagcaggaaggcaagtcctgttttccaataattcttttttttttttttttttttgagacaaagtctcactcttggccccccaggctggagtgcgcaatggagcgatctcggctaactgcaacctccgcctcccgggttcaagcgattctcctgcctcagcctctcgagtggctgggattacaggtgcccgccaccaagcccagctaatttttgtatttttagtagagatggggtttctccatgttggccaggctggtctcgaactcctgacctcaggtgatccacccacctccgcctcccaaagtgctgggattataggcgtgagccaccgtacccggccgtgttttctgataattctgaggctactgctgatgagctgagtgtctctgggcccatgtctgtctggaatgcctggtgccacagagctggggtcaaattactgcctggccatttgtcagctatgtgaccctgtgtaggtgatccggcatgtctccaagactcagtttgttcatctgtgaaatgagaatggtgaccgggcaaggtgactcacgcctgtaattccagcactttgggaggccaaggcgggcggatcatttaagtacaggagttcaagaccagcttggccaacatggtgaaactccgtctctactaaaaaatgcaaaaattagccaggtgtggtggcgcatgcttataatcccagctacttgggaggctgagacgggagaatcgcttgaatccgggaggcagaggttgcagtgagccgaagtcacaccactgcactccactccagcctgagtgacagagcaagactctgtcttaaaaaaaaagaatggtaacagtatcttcctcagggtgtgactgatatttccaatgcagggaggtaagggcttgtccctgggtaagcgtctgatggataatacctgggatggtaccaacgctattggtcactggtgccttaggataatcctggtgtgggtgtgggcaaaagcctgctctcccacagaacagtctggctttgcacctgcttggccctatatgaatctacctccatgtatgctgtcaccagggagcagcacaggggcccagccaacagctggtgggaggaggggcagatgttagagcaggttgagtgaaggaaggatcccatcagagcataacccagatttcacaattatctccaccctggaaggtgggcagggacatcaccaaaggggctgatcttgatggaaaattggtttcttggcccgtgtagtggctcatgcctgtaatcccagcactttggaaggccgacgtgggcagattgcttgagcaaaagagttcaagaccagactgggcacagtggctcacgcctgtaatcctagcactttgggaggctgaggcaggcggattgcctgaggtcaagagttcgagaccagcctggccaacatgctgaaaccccgtctctactaaaaacacaaaaattaggccaggcgcagtggctcacacctgtaatcccagcactttgggaggccgaggcagacggatcacctgaggtcaggagttcgagaccagcctgaccaacatggagaaaccctgtctctactaaaaatacaaaatcaactggatgtggtggtgcatgcctgtagtcccagctacttgggatgctgaggcaggagaattgcttaaacctgggaggttgatgttgccgtgagccaagattgcaccattgcactccagcctgggcaacaagagcgaaactgtctcaaaaaaaagagaattggtttcttaagtagtgaggtgggggtagagggctcattccctaccaaaaatgccccctctcctgtatcaaccctgtctcctgtatcaaacacaccttcagtggaaatcttttcattttcatgtactataattttctatttaaaaagtcacccttaatatatatacatacactggaatatgattcaggttttttttcttctttttccttgagacagagtctcactctgtcacccaggctggagtgcagtggtgcgatctcggctcactgcaacctctgccttgatcttggctcaagcaattctcatgcctcagccttccaagtatctgggacttacttggaagtaagctggccaccacgcctagctaatttttgcatttttagtggagatggggtttcaccatgttgcccaggctggtctcgaactcctgatcgcaaatgatccacccgtctcagcctcccaaagtgctcggcttacaggcatgagtcactgcacccagcctgattcagccttaaaagggaaggatgtaacatgtcatgtgggtgaaccttgaggacattatggtacatgaaatcagccagtcacaaaaggggagatactgtgtgattccacttacatgaggcccctagcgtcaccagattcacacagagagaaagtagaatggtgggtgccaaaggagagggaacagggaattattgattattaggcatggattttcaggtttttgttgctgttgttttgagacggagtctcactatgttgctgggctggaatgcagtggcgtgatctcggctcaccgcaacctctgcctcctgggttcaagcgattctcctacctcagcctcccgagtagctgggattacaggcgcccgccaccacgcccagacaatttttgtatttttagtagagacggggtttcaccatgttggccaggatggtctcgatctcttgacctcatgatccgtccatttcggcctcccaaagtgctgagatgacaggtgtgagctactgtgccctgccagagtctcacgatccgtccgcctcggcctcccaaagtgccgagatgacaggtgtgagccaacgtgccctgccagagtttcagttttacaacatgaaagaattctggagctggatggtggttatggttacacaaccatgtgaaatatttaatgccactgaactgtataattaaacacgattaatggtaaatgttgagtattttaccacaattaaaaaaaatttttaaatatgtcagccgagcatggtggctcacacctataatcccagcactttgggaggcctaagtgggcagatcacctgaggccagtagtttgagaccagcctggccagcatggcgaaaccccatctctactaaaaatataaaaaattagctgggtgtggtgtaggtgcctgtaatcccagctacgcagcaggctgaggcaggagaattgcttgaacctgggaggcggaggttgcagtgagctgagatcccgccgttgcactgcagcctgggcaacaagagcaaaactccgtctcaaaaaaaaaattttttttttaagaagtcacccttaaacccactccttataaaaaaaaatcagtgaaggccgatcatggtggctcatgcctgtaatcccagcactttgggaagccaaggtgagaggatcacttgagatcaggagttcaagactagcctggccaacatggtgaaaccttgtctctcctaaaaatacagaaattagctgggcataggggcacatgcctgtaatcccagctacttgggaggctgaggcaggagaatcacttgaacccctggggcggaggttgcaatgagcagagattgcgccattgcacacaccagcctgggccggtgagacttcatctaaaaaaaaaaaaaaatccatgaatgccaggtgtggtggctcatgcctgtaatcctagtactttgggaggctgaggcaggcggatcccctgagtccaagagtttgagaccagcctggcaacatggtgaaaccccatctctacaaaaaattaaaacagtagctaggcaaggtagtgcacacctgtaatcccagctacttggggagctgagctgggagtatcacctgagcccaggaagtggaggctgcagtgagctatgatcagtaaaacacaagacaggttcactggctcccatcccaacccggaccagctccctagtataacaactcacatgcatgtggactatacccttagagccttcttcttctttcttcttttttcttcttcttctttcttcttttttcttcttcttcttcttcgtgtgtcgctctcacccaggctggagttcagtgcgatcccagctcactgcaacctccgtctcctgggttcaagtgattctcctgcctcatcctctggagtagctgggatgacaggtgcctgccaccacgcccagctatttttttgtatttttagtagagacagggtttcaccatgttggccaggctggtctcgaaatcctgaccttaggtgatctgctgcctgccttggcctcccaaagtgctaggattacaggtgtgagccaacatgcccagccttttttgttttttgagaaagggtctcactctgtcagacaggctggaatgcagtggcatgttcaggactcactatagcctcaacctcccaagctcaagtgatcctcctgcctcagcccctaaagtagctgggactacaggcatgtgccaacacacccagctagttgttatttgctgttgttgttgttttaattttagtagagacaaggtctcactgtgtttcccaggctggcctcgaactcctgagctcaagtgatcttcccgcctcagcctcccaaagtgctggggttacaggtgtgagccaccacatctggccttacagccttcttctgtgtgtttatgtgcatatatgtagccatagggaaaaaaatcaaaatcctttggtgttctttcttattttttcaaatatttcacctgccccattctctttcctttctccttctagtactcccattgcatgcaagttagacctttttttttctttttttttcttttttttgagacggagtctcgcctgagctggagcacagtggtgcgatctcagatctcggctcactccagcctctgcctcccaggttcacatgattctcctgcctcagcctcccgagtagctgggattacaggcatgtgccaccacgcctggccaatttttgtatttttattagagagagggtttcatcatgttggccaggctggtttcaaactcctggacccaagtgatccgcccaattcagcctcctaaagtgctgggattacaggcgggagccactgtgcccagccataagttagatcttttgatatcatccagaaaataccaaggctctatacagtttctaaattgaggtaaaatatatgtaatataaaattaaccattttaaacatgtttaagtgtgcaacttagtagtattcagtacattcaaagtgttgtgcaaccattaccactatccatttttacttaaacttttttcttctctgttcttcagtttggatatttgctatcaatctgtctttaaatttgttagcactttcttttatcatctccaatgcgctatcaagcccaaacagtgaatttttaaatttcagattgtgtatatttttaagttttataatttccatttgttttttgttttgtttgtttgtttgtttttgagacagggtctcactctgttgcccaggctggaatgcagtggtgcaatcacagctcactgcagcctcaacctcttgggctcaagtgatcctcttgcctcagccccccaagtagctgggactacaggcttatgccaccacgctcagctaatttttgtattttttgtagagacggtgtttcaccatgttgcccagctgctcttgaacccctgaactctagtgatccacccaccttggcgtctcaaagtgctgggattacagacataatagctgcctcaaacacctttctgctaattccaacatctgggtcacctcagagccagtctcctttaacttccttctttcctgagcatgggccatgttttccaattttgtgagatgtcaagaaattttggattgagtgctggatattgtggaagatatgttgtagagtctctggattctgttatgttcctttgaagagcaatgattttttaaaatttaactatttttttatcaggcagttaacctggctggactcagactccaaagtctgtttctcctgtggtgggtagcagatgaaatcttggcctagttctgttagcctcagcaaggctagttggaatacgttcaatatccatgggctaagagtcagcaagagatgtacacagacttttaatgtagaatatggggctttccatctctggctcttttcttttctttttcttttttgagatggagtcttgctctgtcgcccaggctggagtgcagtggtgtgatctcggttcactgcaagctccacctcctgggttcacaccattctcctgcctcagcctcccgagtagctgggattacagatgcccgccaccatgcccggctaattttctttttgtatttttagtaaagacagggtttcatcgtgttagccaggatggtctcgatttcctgacctcgtgatccgcctgccttggcctcccaaagttctgggattacaagcatgaggcactgtgcccagcattttttttttttttttttttttagagacagtctcccaggctggagtgcagtggtgcaatcatagcttctgggctcaaaggatcctcccacctcagcctcctgagtagctgggactacaggcatgtaccacctcacccagctttttcttttttttttttggtagagacagggtctcactatcttgccaaagctggtctcaaactcctagcctcaagtaatcctcccacctcagcctcccgaagcagtggaattataggcatgagttacgacacccggccctatcctcttaatctttaagccagtttttatctccaatgaatagcaataaaaatgagaaattcacccagtgccatttctttcttccatttatagattcccttccgattgctacttgtttttcctctttagagtgatactgtccagtagaattttatttcttttttcttttcttttttttaagacagaatcttgctctgtcacccaggctggaatacagtggtgcaatctcggctcgctgcaacctctgccttccaggtttaagcgattctcctgcctcagcctccctagtagctgggattacaggcacgtgccaccacacccggcaatttttttgtatttttagtagagacggggtttctccatgttggtcaggctgatctcgaactcccgacctcagatgatctgcccacctcggcctcccaaagtgctgggattataggcatgagccactgtgcccggcctagaattttctacaatgatggaaatgttccatatctgaattctgcaaagtggtagccactggctacatgtggctattgagtatacaaatgttgttagtgcaacatatttattaaaacctttttatttaaacctttttttttttttttgagacacggtctcaccctgttgcccaggttagagtgctggtggtgtgatcacagctccctgcagcctagatctcccaggcttgtcatccttccacctcagcctcctagagagtagctaggactacagggagacaccaccatgcctcgctgattttttttttttttttttttttttttgaagtggaggtgaggtttcactatgttgtccaggctggtcttaaactcctaggcttgagtgatcctcccgccttgacttcccaaagtgctggggttacagacataagccactgcagccagcctgaatctttttattttattttttttaagagatgagggtctctctatgttgtccagcctggtctcaaattcctggcctcaagcaatcctccaacttcagcctgggattacaggcaaaagccaccacactcggctaatttttttttggggggcggagtcttgctctgtcacccaggctggagtgcagtgctgtgatcttagctcactgcaacttccgcctcccaggttcaagcgattctcctgcctcagcctcccgagtagctgggatcacaggcacgtaccaccacacccagctaattttttgtatttttagtagagacggggtttcaccatgttggccaggctggtctcaaactcctgacctcaggtgatccgcctgcctcggcctcccagagtgctgggattacaggtgtgagccaccgtgcctggcccaggtagttgtttttttatatttagctcagtgtttatcattgttatctatgaaagagctggcctgatgtggctgacttcaccattaccagaaggagaattcttgtggttttccattgtataaattatcaggccattagtgtctctctgtactttgcttttattttttttaactccataatcctcccaagccattgaacatagctcttcctccaccccatacctcctttagtaatttttaaaattaaaaaattttttaattgtggggccgggcgcggtggctcacgtctgtaatcccagcactttgggaggccatagcaggtggatcgcttgattccaagagtttgagaccaacccgggtgacatggcgaaatcctgtctctacaaacaaacaaaaacacaaaaattagctgggcatggtggcacacgcctgtagtcccagctgctcaggaggctgaagtgggaggaccacttgagcctgggtggtgaaggttgcagttagatagcaccactgcactccagcctgagcaacagagacctcgtctcaaaataagagagtcggctgggcgtggtggctcacgcctgtaatcccagcactttgggaggccgaggcgggcggatcacgaggtcaggagatcgagaccatcctggctaacacggtgaaaccccgtctctactaaaaatacaaaaaattagccgggcatggtggcaggtgcctgtagtcccagctactcgggaggctgaggcaggagaatggcgtgaacccaggaggcagagcttgcagtgaactgagattgcgccactgcactccagcctgggcgacagagtgagactccatctcaaaaaaataaataagacagtctccctctgtctccaaggttggagtacagtagtgcagtcatagctcactgcagcctccaacgcctgggctcatgcagtcctcccgagtagctgcaccacaggcatgagccacagcccccagcttccagaacctttttgttttccaaaactgaaatgctgtactttacccattcaattttaactccccatttcccttcccctggcacccaccattctattttttttttttttttttttttttttttggagacagagtcttgctctatcccccaggcaggagtgcagtggcttgatctaaactcactgcaacttctgcttcccgggttcaagcaattctcctgccttagcctctcaagtagctaggattacaggcacgcatcactatgcccagctaatttttgcatttttagtagaggtggggtttcaccttgttagccaggctggtctcgaactcctgacctcaggtgatccacctgcctcggcttctcatagtgctgggattacaggcatgagccaccacgcccggccccattctactttctgtcactatgaatgggactattctagagacctcatataagtggaatcatacaggatttgtcctcttgtgacaggtttatttcattcagcataacgtcctcaagatttatccatattgtatctttctctttttctttctttctttcttttttttttttttcagacagagtttcactcttgttgcccagactggagtgcaatggcaggatctcggctcactgcaacctctgcctcctgggttcaagcaattctcctgactcagcctcccgagtagctgggattacaggcacacaccaccatgcctggctaatttttgtatttttagtagaaacggggtttcaccatgttggccaagatggtcttgatctcctgacctcgtgatctgcccccctcagcctcccaaagtgctgggattacaggcgtgaacgaccgcacctggcataatagggacgaggtttcactatgttggtcaggctagtctcaaactcctgacctcaggtgatccacctgcctcggccttccaatgtgctgggattacagggccatctttttgcttttttttccccatttgctgttttaaaacttctagttcaggccgggcatggtggctaatgcctataatcccagcactttgggaggccgagggaggtggatctcctgaggtcaggagttcgagaccagcctggccatcatagggaaaccctgtcaaaaaataaataaaaaatacaacttctagttcaggctgggtgtggtggctcatgcctataatcccagcactttgggatgccgaggtgggaggattgcttgaacctaggagtttgagactagcccaggcaacatagtgagaccctccccccaatctctataaagaattttaaaattaggcaggctggtggcatgtgtctgtggttccagctactcaggaggctgaggtgggaggatcacctgagccccaggtgggttgaggctgcaatgagctgtgatcgtgccactgtagtccagcctgggtaacaagagcaagaccctatcccaaaacaaaaacaaaacaggccgggcgcggtggctcacgcctgtaatcccagcactttgggaagccgaggcgggcagatcacgaggtcaggagatcaagaccatcctggctaacacggtgaaaccccgtctctaccaaaaatacaaaaaaattagctgggcatggtggcgggcacctgtagtcccagctactccgggggctgaggcaggagaatggggtaaaccgggaggcggagcttgcagtgagccgagatcgcgccactgcactccggcctgggtgacagagtgagactctgtctcaaaacaaacaaaaaaatgccttctagttgaaaaggttttacatgtcctatttcatgacttgtcatttggtgtaccagagttttgttagttcaaatcgagaaagacgtttcctaacatgacatatgcgttagtaaggttttctttggagggggaactctgtatatgctaggtgtttcttaaactttcccaagagtttgggtcaaatttctgcttatggctgggcgtggtggttcatgcctgcaatcccagcactttgggaggccaaggcaagaggaacgcttgagcccagcctgggcaacatggtgaaatcccatctctacaaaaaagtacaaaaattagctgggtgtggtggcacccgcctgtagtcctagctacttgggatgctgaggtgggaggatcacttaggcccaagacgcagaggtagcaatgagccgtgatctcgccacggcactctagcctgagcaacagaaccaggccctgtcttctaaaaaaaaaaaaaaaaaaaaagaaagaaagaaaaaacagggctgggcgtggtggctcatgcctgtaatcccagcactttgggaggctaaggcagatggatcacttgaggccaggagtttgagaccagcctggccaacatggcgaaaccccatctctactaaaaatacaaaaattagccaggcatcgtggcatggacctataattccagctactcagtgtggctgaggcagtagaatcgcttgaaccagagaggtagaggttgcagtgaactgagatcaggccactgcactccagcctgggcaacagagcgagactctgtctcaaaaaaaaaaaaaaaaaaaaaaaaacgaaaaggagaaaagaaagaaatctgtttatttcttagcttgcaagtcaccttgctgttagttctctcacagttatctgccccaggaacacagagacgattatagataaagatcctgttaccttggacctggtaaaggctgctggactaggtgtagctcactcagcctccagctttctgttcattatcttgattgagggggtgatttcatgggtgtgtacatatgtcaaaatgtgttggaactgctgggtgccgtggctcatgcctgtactctcagcactttgggaggcggaggcgggcagaccacctgaggtcaggatttcaagaccagcctggccaacattgtgaaaccccatttccactaaaaacacaaaaaaagttagccacgcatggtggtggatgcctgtgatcccagctacttgggaggctgcggcaagaggatcacttgaacccaggaagtagaggttgcagtgagccaagatcattccactgcactccagcctgggcatagagactgcatctcaaaaaaacagaaaaaagtaggccaggcatggtggcttatgcctgtaatcccagcactttgggaggctgaggtgggtggatcacaaggtcaggagattgagaccatcctggctaacatggtgaaaccccaactctactaaaaatacaaaaaaattagccgggcgtggtggtgggcgcctgtagtcccagctactcaggaggctgaggcaggagaatggcgtgaacccgggaggtggagcttgcagtgagccgagattgcgccactgcacaccagcctgggcgacagagcgagactccgtgtcaaaacaaaacaaaaaaaagtgttggatctcacactttaaacacgtacagcttcttgcctgttgattatacctccgtaatgctgtttttatttttatttttttaccattaatagcccaagtgggccccctcacactcccacgtgtatacttaatcctgtctctgtgcgagtaacaatcagatggtaatccccccccacaatccctgctccactactccacctctggggctggggactgctcattttttccctccaaccccccagagaccagatcctctctcctccctcacggacctccccactttactctgggatgctgggggcccctggagatctcaccctggcctgaccatcactaactggggagagacttagaggcagacttgaatactccaacctccagggagccagggctggctcagaagaaaggtctaggggcagggaggggtattggctggggaggggactctgcctagcataggaagagcaggggaggcctcttaaatagggattttaatctgatccaggacttgaaaggcaagtgggaactggcccagggaagagggcggaggcatgttggaaaaagggcactgatgcagaggcctggaggcttggggctggtcttgggaatcataccatctggatggcatggggctgaggtaaccagagcttgaatagaactgcagaagagacagatgattccagaagggtaaggaggtggaggcccctctttacttccttcccacagcaggcaccaggccagagttgggtgggcacctgctgggggatcctcatggtccagtattggttgtaggttttgagggggctgacaggagaggtggttgccagggaatggttccaagaagatgcaataggggaggaggctggggatacccaggggacatggcccagcttacggaggctcctgagcttccaggggcatagacattaagaaattgcacgctgagcccgagtgtggtggcttgtgtcggtaatcctagcactttgggaagccatagtgggagaatggctcaagaccaggagtgcaagaccagcctgggcaacataccaagaccctatctctacaaaaaaataacaaaaattagctgggtgtggtggcatgctcctgtagtcccagctgcttggaaggctgaggcgggaggatcacttaagtccaagagttcaaggctgtagtgagctgcaatggtgccactgcactccagtctgggcaacagaatgagaccccatctctttaagaaagaaaaattgtggccaggtgtggtggctcacacctgtaatcccagcactttgggaggctgaggcaggtggatcacctgaggtcaagagttcgaaaccagcctggccagcatggtgaaactccgtctctactaaaataaaaattacccgggcatgatggcaaacacctgtcatcctagttattcaggtgggtgaggcaaaagaattgcttgaacccgggaggcagaggttgcagtgagccgagatcgcgccactgtactccagcctgggcaacaagagcaaaactccgtctcaaaaaaaaaaaagaaaaagaaaaaagaaaaattgcatgattagcttctagtaccccgaaagcttagagggcaagtagaaggaggagcttgctttttggggaaactttaatcagcagaggtaggcctggggaggcctccgcaggaccgtatgaaccctgagcccactgtgggagcagagcagccccctcctcacccaaggaagcttctatccttgactgtcccccttgctgactgagtgacctgtgatctgtctctagtcatttcttgctttgagccttgggcttcccagttcccacgtttcctttatgggaatgtttatggagatcaagccaaccatgcctgttaagggtgggttatttttctagagagtttgaccacctgagctaacatccttgcaccctcccacctgtccatctgtctattctactcattcatccatgtagcaaacatttatgtggcatctaatgtgtccagccctgtctgaggctctgaggatacagcagtgactcaaacaacattcttttctttcatgaaacttatgccttggggtgaagaagacaccccaatgaaacagatcaactgggacaagagggttgaaggaactacacaggatcaggagacagaataatatggtggcctctttggtggtagtctgagaagtcttcttggaggaggtgacatttgagctgaaataagaatgataacacagtcagacatgtatgtgactgtctggggtgcaaacatggtacaagtgagcttggtgagttggaagcccagcaagcagcagttgctatggattaagctggggaggcagaggtggggaggcagcagggccagaatgtagagggcaggaatgtgtgcagaaataaggggctcaggtaaggcggaaccttgaacttggggtccaccttggggtctttggggggagtggtacctcaaccggcagcatctctggtcactaacaccctgtgggacctctgctcagagaggctcagagtggaagagacaggtccgtctggaagggacagccaggacccggtgcagaggcaggctgtggttatctgcaaacagcccccttccttccagcatgtcacgtgctcccgcctgagcctctggccgcaggaatcaggtgaccccaggcagcgggccaggctgcaggggcgggtgagtgagtcaatgtatgcaagtgtgtgtgtgtgtgtgtgtgtgtgtgtgttttcatctctgggaggcccagacatctggggtctgaattaattgcctttttcacaaccatggacaagtcctgtatttccagctagattgaaagcaaaacaaaacaaacctatgtgcatagctctgatctgctgagcagtgccagggtccttgggggttcggggaagccgtgggaaccagtccttctcactcagacccctgaagaggggcagggatcctctactcatgccccctaacccacctcccgtgtcagtacaaagccccattctctctctttcccccaatctggggctatttttagccactaagaaggattatcagtttggttcccaggtggcaggggccaagctgggagtggggccagggaggcttcaaacagcagccaggcttgggggcgggtggggtgaggggagaagaggctggtcacactggccctgccacccacgcggtggctctgcagatgaccctgaagctgctgtcgtccagcccagcccaaacacttcagctgcagctttaagggaaggtggcaggggcaaggaaagcttccagcagccttaggcacctcagatgctggaaaccgtcctaagggcttggaagaaccatctagaagcctccataggccagcaccccttctttccagaccactccccatcctgcccccacctcctgtctagcagtaactatcacagtctaagctgttttttggggggtttttttccgaaacaggatctgctccgtcacccaggctggagtgcagtggtgtgatcacagctcactgcagcctcaaactcctgggctcaaccagtcctctcacctcagcctcctgagtagccgggattacaggtgtgtgtcactatgcccacctaatttttaaatttttttgtcttgctatgttgccctggctggtctcgaactcctgaccttaagcaatcctcccacttcggcctctcaaagtgctgggtgtgagccactgcactcggtcctctaaattttactaggtgctcactccacctcaggtgccattccgaaccactccatgtggaagaggggctattgtttgttccattttacagataaaactgaggcacagataggccacgttccatgcctggtaaacgggtgaggcaggaatcaggaatcagatccgttgtgatatcagcatggagtgtttataaactgcccgcctgccctgagcctcacaatagcctggtagaacaaggagggaatctagctgtacccatttttcagatgggacaactgaggcccaggaagacagaggatgacagggaacaaacagaagaactggatccaaaagagaaaagctagaaattgaggaacacatccctcagcctcatttcctcccttccctcaggagaagttgagccttgctggcctgaggtgcctggttatagccatgcctgagcccctcccatatgccagactctgcctcaatgccccaggtgcaaggtctctgagctgcttaaccacccttcagggagggcacctgtcccaccaacaggtgacgaaattgaggctcccagggctttgaagcattgcagctaggactccagccagtctgctgggctccagaccctgttcttttctcaaaccacagcatcttttatttatgctttaagagggagaagagggaagggacgagacagagacaggttggtgaggttagtgagagagtaggacctctggggccagacctctgcaatcagggcatatcagtctgaagcctccttggagagctccctggtttagaaagtgcatctgttcccctttctgtgccactcaggaagcaatgggcatgattcagcagaggagaggagagtttagaactggttatgcttccttctccaaccctccctgcaaaaacactggccagctcctgacatcacagtaagacagggttgcgggagggtgctttaacaggatccaaagcagggcaattgggctgctttcaggaggaggtgacaactgagctgggttttgaaggatgcataggagtttgccaaacagagaaagaaagcgtttaagctcttcagggcagagatgttgcttgttttccccaccattttgtgtcttcagcacccaaatactaaatgagcattctaggcagaggccagtatttgtaaaggctaggatgtgtgaaacgatatggtctggtgggagcagagtatcagtcagtaaactggtgggcattgaagctgggcacatcagcagaggcaaggcttgagattgtgagaagccattgctcctgtggttctccctcatcccctacactcatcatgacttgaatgtaccaaggtgtgcaaggatgcatccaagacccttgggtgaggggaaaacatggagctgggggtctggatgcctgggccttcctaggacacctagtccccttccatctgcaccttggggtctgtcagaaaggtagcagggtctctgagaaagctgcaccagtgactcagaaggctgaggtgggaggatggcttgaacccaggagtttgaggctgcagtgagctatgatcaggccagtgcactccagtctgggtgacaaagtgagaccctgtctctaaaaaaaaaaaaaaaaaaaaaaaaaaaaataggggattgcagataccctgcagtggtcatggctttggctgtgagagctgagtacagttgggaccaagagtgccaagctggccatgtgtccttgagcccccacgggcacacgggatcaagccaaccttgtctgctagtgaagatgatttctttttcttgagaaatcaaccacctgggctgaagtccccacatccacccagctgttcatgtgtctactctgtctgggatgcctgggcctcgttgtaggtctagactagctgctatcccacacccttgactgcttgttgggtcactgacttctagtgcccctccccaaccagagtatccaatgctagcaacagcttctaatacttcactgatgcctaaatgtcagttgccccatagcatggtacttagcctgccccttcatgtgcagtctcttccttttttttttttttcccccaaaacagggtcttgttgaccccttgctgatagatagaggattccatccatcttcatggatttcaacagcagccactcactgacaagtcctacccaggccccacccaccccaagcctgtgccccaaacctgagtagctcctgcctcctccacacgcccacgggaacattttagctgccctcccccacacccacaatttgtgttgtctgacacttagcctgactcctgtcctgaaatcagctcatccattctggttcatccagttcttcagactggaaggctgacagcttcagtggccaagtggggtgaggctgaagatggaattaaggttgttaatcagctgagcttgagatgggagatcatctgggtgaacccagtgtcatcacaagggtcttaaaatgaagaagacggaggcaggagagacactgtcagaatgacaaggtgggagaaagacccaactagccactgctggctctgaagatggaggaagggaccaggagctggagggtgcaggcagcctctaaagccagaaaaggcaggaaatggctgggtgtggtggctggagcctgtagtcccagctactcgggaggctgaggcaggaagatggcttgagcccaggagatcgaggctgcagtgagctatgattgcaccgctgcattccagcctggaagacagagtgagagattgcctccctgcagaaaatgtagtctcttagcaattttccagtatatactatattattaactaaaatcatcatgatgtacagatctcttggacttactactgctgctaactgaaatgtcatatcctttgaccaatatcttgccaatttcctctcccaacccttctcttttctggctccactttggaaagcatttggctcttggggggccccacctctaaaatgtctctggaatccccttatctctaccttatctcaactggacatgccagagcaccctcttctggcctccaaaatgctacgccctgcatggcaaccaacacctgagaatccctgcattattcaaaatagaaccaagggcaacggaaccctcacattctcctgctgggagtgtaagatggtgcagtcctgccttggaaagcagtttgcccaccttggcctcccaaagtgctgggattacaggggtgagccaccacccccggctgccccctaggctggtcttgaactcttggctttggccaggcgcggtggctctcacctgtaatcccagcactttcggaggccaagacaggtggatcacgaggtcaggagatctagaccatcctggctaacatggtgaaaccctgtctctactaaaaatacaaaaaattagccgggcgtagtggcgggcacctgtagtcccagctactcgggaggctgagcttgcagtgagctgagatcgtgccactgcactccaggctgggcgaccgagcgagactccatctcaaaaaaaaaaaaaaaaaaaaaaaacactcttggcttcaagcaattctcctgcctcagtctcccaacgtgctggaattacaggcatgagccactgcacctgggtctattttttattttatttatatatttttattttttattgatttactctgtttttggagacaggtatcactctgtcatttaggctgaagtgtggtggcatgatcacagctcattgcagccccaaactcttgggcttaagcaatcctcctgcctctgcctcacgagtagctaggattatggccacatgccaccttgcccggctaatttttgtattttttgtagagacagtttcgctatgttgtccaggctggtctcaaacccctgggttcaagcaatcctcctgcctcagcctcctaaacactggggttatggtatttttatttttatttattttatttatttttgagatgaagtctcgctctctcacccaggctggagtgcagtggcacaatcttggctcactgcagcctccgcctcccgggttcaagcaattctcctgcctcagcctcctgagtagctgggattacaggtgcccaccaccacccctggctaatttttgtatttttagtagagacggggtttcaccgtgttggccaggctggtctcaaactcctgatcgcaagtgatccactcaccttggcctcccaaagtgctgggattacaggcttgagccaccatgcccggcctatttttattttgtaacatggcaaggttatcatgaagaactgacaaaactaagctttgatgacaaaaaaaaaaaaaaaaaaaaaaaaagctggtggggggcagggcaaggtggctcatgcctataatcccagcaatttgggaggctgagtggggaggattgcttgagcccaggaggtcaagtgtgcagtgaggtatgatggcaccactgcactccagcctgggccacagagtgagaccctgtctaaacaacaacaacaacaaaaaaacaaaaaaactggaatggttgttacttttggatgacaggacaggggtggaggttgactgggaagaggtatgagggaagtttctagaggaaatatttgtgataggagactggattagtcaggtacatagttttgtccaaactcagtgactgtacccttaaagatgtgtgcgggccaggcgcagtggctcatgcctgtaatcccaacacttcgggaggccaaggcgggaggatcgcttgagccaggggtttgagaccagcctggataacatagggagaccctctctctacacaaaaatttaaaacattagccagtcatggtggtgtgtgcctatggtcctggctctgcgggggctgacatgaaaagaccacccgagcccgggaggtcaaggctgcagggagccatgatcgctgcattccagcctgggtgacagagtgagaccctgtctaaaaaaacaaaaagtctgcatttcacttgggtaaattttaccttgaaaggaaaaacccataagcaaatattgaaccctagttaatgatctgtgtgctgacatgtgtaggggcgatgtggcctgaggtcagctgcctactttgaaatgcatcgggaacaagcagatagactgatggtggatagagggatggatgggcagaggcagatgggtgatggaataaacagaatggaatgcaaaggggagaatctagtggtgggaatacaggtattcactgtaaaattctttcaacttttgtgtaggtttgaaatgtttattataaaacattgggggaaggccgggcgcggtggctcatgcctataatcccagcactttgggaggctgaggcgggcagatcacttgaggtcaggagtttgagaccagcctggccaacataacaaaaccccatctctactaaaaatataaaaattagccaggcatggtggcgcatgcctgtaatcccagctactcgggagactgaggcacgagaattgcttgaaccctcaaggtggaggttgcagtgagctgagatcgtgccacggtactccaggctgggcggcagagtgagactccatctcaaaatgttgggggaaataatccagattcttccctgcggcccccatgccttgcaggctctgtgctgcccctcatcacctccctgccctcccctcctccctctctcccccttgctcactgcaccagccacacggacctcctcactgttgctccaacatcccaggcatggtcctgcctcagggcctttgcacctgctgcgtatttatctagaaagcccctcccccagccccaccttcttgtgtgaaaaacccacaaccttctcatctttttttttctcatagggtcttgctctgtccctcaggctggagtatagtggtgtgatcgtagctccctgcagcctcaaactcctgggctcaagtcgtactcccacatcagcttcctgaatagctagaactacagatacgtgccagcacacctgactactttttaaattttttgtagagacagggtcttgctatgttgcccaggctggtcttgaactcctgagctcaagtgatccacctgcctcggcctcccaaagtgttgggattacaggcatgaaccactttgcctggcctgacctccgcatctttttttttttttttttttaagatggagtcttgctctgttgcccagtcttgagtgcagtggcatgatttcaactcactgcaacctctgcctcccaggttcaagtgattctcctgcctcagcctctcaagtagctggggttacaggcacatgccaccacacctggctgatttttgtatttttagtagagatgaggtttcaccatgtgggccaggctggtcttgaactcctgacctcagatgatccacccgcttcagcctcccaaagtgctgggattacaggtgtgagccaccgcacctggcctgacgacctcatctttaagtcccagctcaggtggcgcctccttagagagcctctccttgatcacatttaaaatcacgccactctgttatctacccggcccgttatactttggcatctcattcatttatgaatctgtttacttgtttattggctgccttctctgttggtctgtgagctgggcaggaatgtgttggctttattcccctgctgtgtcgccaaggcccagccctgacctgacatgtacaagtcaattggagaatatctcttgcctggatggatggatggacagacagacggatagatgcaacgacagatggataaatggatggatggaaggggaaatggatagatggaagaaaagatggacagaaggatgggtgggtggaaggacacacaagtgagtgatggatgatgagcggatagatgtttagatgggtggacagatggatgatgaatggatggatgatgggtagatggacagatttttggatcagtggatggatgatggctgggtggacagatgtttagatgggtggacagatggatgatggatggatgggtgaatgggtaggtggatggatgatgggcaggtggacagatgtttggatgagtggatggatgatgggtgggtggacagatggatggatgaatggatggggagatggatgaatgggtgggtagatggatgacagatggacgataggtggatggacaggtgtttggatggatggatggatgatgggtggatggatgaatgggtaggtggatagatgatgtttgtatgggttgatggatgatgggtgggtggacagatctttggatgggtgggtggatggatggtgggtgggcagatgtttggatgggtggacatatggatgatgggtagatggatgagtggataggtggatgatggataatgggtggatggacagatgttttgatgaattaacagatgaatgatgggtggatggacagatgtttggatgggtggatggatggatgatgggtagatgagtggataggtggatgatgaataatgggtggatagacagatgttttgatgggcgaacagatggatgatgggtagatggatgatgagtgggtggacagatgtttggatgggtggatggatgatgggtgggtggacagatgtttggatgggtggatggacgatgggtggatggatgatgggtgggtggacagatgtttggatgggtggatagagggatggatcggtagatagatggacagggggatgcgtggacagacgaatgaacgaacaaactttctgagtgggaaccactgtggtaggctggacccttggctcaagatctcagggaagggagcagctctttgggctcctcaagcaggctgggacacgctggccggagctgccccacctcgaccgccactccattatcaggcaagctcagttatgcagtaggctctcttaccctcttgctttgtgggctctgggatagcaagagacccccctgaaattcccacctagagaggagcctaccttccatagatggccaggaaaggaactctggattttttttttttttttttttttgagacagagtcttgctctgtcacccaggctgcagtgcagtggcctgatctctgctcactgcaacctccgcctcccgggttcaagcaattctctgcctcagcctcccgagtagctgggattacaggcgcacaccaccatgcctggctaatttttgtatttttagtagagacagggtttcaccatgttggccaggctggtcttgaattcctgacctcgtgatccacctgcctcggcctcccaaagtgctgggattacaggcagtgagccactgagcccggcctctggatttctttaaatccttcatctttgggggctgcttcagaggcagcttcctgcagtggaaagaaaccttcctggacgtttgaggactcaagttcttttttttgagacagtttttctctgttgcccaggctggagtgcagtggcatgatctcggctcactgcaacctcctcctcccgggttcaagcgattctcctgcctcagcctcctgagcaggtgggattataggcgcctgccaccacgcccggctaatttttgtatttttagtaaagatggagttttgccatgttggccaggctggtctcaaactcctgacctgaagtgatctgcccacctcagcctcccacagtgttgggattacaggcatgagccatggtgcccggccacgactcaagtttctgaccccaagcagccactcccttgacttctggctaccatcttggcatcagttaagtgcagagtaataactactattttgggctgtgttattattactcttgttaaagatcaatcggccaagcactttaggttgagaagcctgggtattactgtctctgtttttttgttttgttttgttttgtttttgagatggagtcttgttctgtcacccaggctgcagtgcagtggcacgatctcggctcactgcaacctccgcctcccaggttcaagtgattctcctgcctcagactcctgagtagctgggattacaggcatgtgccaccacgcccagctcatttttgtatttttagtagagacagggtttcaccatgttggtcaggctgctcttgaactcctggcctcgtgatccacccaccttggccttctaaagtgctgggattacaggcgtgagcaactgcgcccggcctactactctgttttacagatgaacttgaggttcagagaggtcaagtcatttgcctgaggacacacagcccaactctgccttttaacactgaccaggcaatggagtgggagtgatgagaatgaagtggtggctcttctgggaccagaggacagttccaaagtcccaggcaaggggagttccatcttccagtcctgcctcctggttgtcaactgcgctgataggggcccgagtaggagttctgaggctccagcctctcaggccccacttgccccacccattctgcttgcagacctcccagctaactggaacctgtgtccacagaatgctgtccagtttcaacgagtggttttggcaggacaggttctggttaccacccaatgtcacgtggacagagctagaagaccgggatggccgtgtctacccccacccccaggacttgttggcagccctgcccctggcgctggtcctcctggccatgcgccttgcctttgagaggtgagtgtctgccctgccgcaatccattgcccccgcagtcgctccagtatgtgctcgtgccctgtgtgcaatttgccattgcagcatgtcccgagtagaagctggctttgcaccaaagcgcgttccctggctccagcctgcccccagccgccaccacccacacttctggcctctgatggctggtttataggaacactgactgcagctggtttataggaacactgcactgcctgcagcctgcagctgggtatgccagcatcttcataaaacagggatgggaggccgggcacggtggctcacgcctgtaatcccagcactttgagaggctgaggcgggtggatcacttgaggtcaagagttcgagaccagcctggccaacatggtgaaaccctgtctctgctaaaaatacaaaaattagctgggcgcaaacctgtaatcccaactactcaggaggctgaggcaggagaatcgcctgaacctgggaggtggaggttgcagtgagccaagattgtgccgctgcactccagcctcggcaacagagcaagactccataaaaaaaaaaaaatgtgagctggggtgttatcccatcccaaaggcatcccagggcctctgtgaaggacagtggggtgggcggagggttttccagtttcaaacgcaggggttttagcccttaaaaaaaatttttttttgaatctaggccagacgtggtagctgattcctgtaatgtcagcaatttgggaggctgaggtgggtggatcacttgagtccaggagttcgagaccagactgcgcaacatggtgaaacctcatctctattaaaaaaaaaaaaatacaaaaattaggctgggtgcagtggctcatgcctgtaatcccagcactttgggaggccaaggtgggcggatcatgatgtcaggagttcaagaccagcccgacaaacgtggtgaaaccctgtctctactaaaagtacaaaaaattagttgggtgtggtggcacatgcctgtagtcccagctactcaggaggttgaggcaggagaattgcttgaacccaggagacagaggttgcagtgagctgagatcatgccagtgcactccagcctgggcaacaagagcaaaactccatctaaaaaaaaaaagaacaaaagcctcatccccaccagtagctgggactgtaggcatgccaccatggctggctaacttttttttttttttgagacagagtcttgctctttcaccttggctggagtacagtggcacaatctcagttcactacaacctctgcctcccaggttcaagcgactctcctatctcagcctcacaagtaactgggattacaggcatgtgccaccacacctgactaatttttgtatttttaatagaaacggggttttgccatgttggccagactagtctcaaactcctgacgtcaggtgatccacccaccttggcctcccaaagtgctgggattacaggcaagtgacaccacaacccagctaaattttgtatttttagtagagacaaggtctcaccatgttgcccaggttggtcttgaactcctgagttcaagcaatcctcccgccctccacctccaaaatgagactttaagaggcaggaggcaggaacaaaaaccagaatcctgagttcaaatttcaggtctttcacctgctcacagtgtcaccttgggcatgtctctgagcctcagtttacccattaggacaataggaactgagttagggttagacgagccaatgtatcacatggacttggccccatgcttagcagataataagcgctcattctctccgcatcatgatttattctgcaatgagttccttgctaggctgctctgagcctttcaccaaatgaggcaggatgttaggagggatggtggatataaaattcggtccccacctgtggtgttggcgcgccctcttgtgggcaacgtggccattgaccagggtccctgatctccaagcctctaccccggaatgggggatgctgggaggaggggcttggagcgggaacagccccagcccctgcccatggggagcccctagactggcggggggtcagaccaggacccaggccacagtgagacaggcagtgaagagactcttgtccctggtttgggattgggcaaaggtacctgggtaccccaagagttggtctgcacaccctcaccctacagacaaaggtccagctgccttttttttttttttttttttttggggagacagagtcttgttgctctgtcacccaggcttgagtgcagtggtgcgatctcgactcactgccagctccgcctcctgggttcacaccattctcctgcctcagctcagcctcccaaatagctggggctacaggggcccgccacctcgcccggctaattttttgtattttcagtagatgcaatcctggctcactgcaacctccacctccaggttcaagcaattcacctgcctcaacctcccgagtagctgggattacaggtgcacgccaccacacccagatgattttgtattttcagtagagacagtgtttcaccatattggtcaggctggtctcgaacttctgacctcacgtgatccgcccacctcagccccaaagttctgggataacaggcatgagtcagctgcctttcttatgtttggtctaacgcagcagccaggccacccctccagggccccaggggatgaggccaggaataagtggaaaatcgagtcctgccccacgagcctttctgactctgggcctccaaaccctctgatcagatggaaaagaaagaccaagtcttaggccgggcgcggtggctcaccgctggtaatcccagccctctgggaggccgaggtgggcagatcacgaggtcaggagatcgagaccatcctggctaacacagtgaaaccccgtctctactaaaaaatacaaaaaattagccgggcgtagtggcgggcgcctgcagtcccagctactcgggaggctgaggcaggagaatggcgtgaacccgggaggcggagcttgcagtgagccaagatcgcgccactgcactccagcctgggtgacagtgcaatactctgtctcaaaaaaaaaaaaaaaaaaaagtcttacacaccctgccatgtgccagctgtgctctctgagcctgtaactttgcccctccgagacttggttatcccaccggcagcatgtctgcccccacacacaggcagtcccatctcttcacctgggctgataggctctgtctcctttgcacccagattcattggcctgcccctgagccggtggctgggtgtgagggatcagaccaggaggcaagtgaagcccaacgccacgctggagaaacacttcctcacggaagggcacaggcccaaggaggtgagagccccccatgccctccgacccgcactactgccctgggggtggggcgtggggatggtgtgtggcccatttgttggggcaggagaagccaaggtggctgcaggcacccctgcaatgcccctactttccactcttcatcctcaattccctgggaaagggctctaccccccagcctccctgggaaacgacgccccacccctcccagcatccctgggacatggagccccacccttccagcctccctgggagatgaggaccccccccttcccagcctccttgggagatggggcccctcccctcccagcctccctgagccttagtgggcacagttgcacaatggacagattctaggagagtgagagtagttgcttgctctcctatcctggggaggaatggaaggtctgagctgatagggaatggagtaacagaagcagccctgtgaccctccctccattcccgtctctggtgtggctgcccgctggacagggtctgtgctgtggaggcgtggctgcgtcctgagtggggtggggaatggtgaagaccacataccctagaggcgacagggcagcttccgcagagctagacgtgactccccctttacttgtcaatttccctcttcaggtagggcttggggctggggcaaggtctcaactgcctgtctaggttggaggtgagaactgaccgttctggagggacgcagggaagcctatccgggggtaggggatgctgcacgccagcatctctcttaatcccatccccgtcagcgacctgcctgccctatgaacaggatttgcttctcttagggcccaagtgttctgcagggccccacgctgggacccccaacactgcccctccatatagacatggtcaccctgtaggcaagatgtgggcctgcagtggagagggcagagccaagtcctgtctggggacatgggggaagccaccacagggcctctgtgacccttgtcctcatcaccccctccccagccccagctgtctctcctggccgcccagtgtggcctcacgctgcagcagacccagcgatggttccggagacgccggaaccaggatcgaccccagctgaccaagaagttctgtgaggccaggtaagcccaggatggggcttctggggtgcagggaagcgggccggggtggggcggggcgggtgtctgctattttcacagctccctccccatccacagctggaggtttctcttctacctgtcctccttcgtgggcggcctctcggtcctgtaccacgtgagtataccagagtatagctgactgctcacctgccccatccacctggcctagatctggcaggagtgggggtgtggagtggtgcagccagagaggaaaacatgcagctgaggagagagcgagctttgcaagatggtggtgaatgttcactcaacaggtatttggatttactatgcaccaaaagttggggttctgcagtgaatgagccccccagtcgagagtgagaagcaggaaaaagcagggctgggtgaaggtagcatctatgtgactgtggaaggagaaccaaagagaccgcagacccagggtgggaggttggattctcacctctgcacagcctgacacccatttccctgcaggagtcatggctgtgggcaccagtaatgtgctgggacaggtacccaaaccaggtgagtggcagagtgtgtgtgaatgcttggagggtgagggcgatgatcacagttgctgcagccatgggcatgggacccgaaccctgacactacactgtcattccccactgagtcccacgctctttgattcctctggggaatagagaggggccagaaaaccaagcaggagcttccaccaaaccactgcccttgattacctccagggatggggagctcactcattgggattcaagtatcctggttttgagcaaacggagtgggcccggagccatacccctgcccgattggagccttcgctccccacagctaaccttgtcctgtcctgctgcagactctgaagccatccctgtactggtggtacctcttggagctgggtttctacctctcactgctaatcaggctgccctttgatgtcaagcgcaaggtgaggccaaataagagtctggaagacccagtctctggccgggatgctggggtgctggggggtagggcagccttacaaccgcaccttgagagctccctggtgcctcctgcaggagatatagaggccatgggcccagaggccacaccaaccccctgaaaggacccacttcttggcccatagggtgggggaccttccagcatcaagcctcgtccccactatgacccaccgtctactgcaggatttcaaggagcaggtgatacaccacttcgtggcggtcatcctgatgaccttctcctacagtgccaacctgctgcgcattggctctctggtgctgctgttacacgattcctctgactacctgctggaggtgggcccgacccctgcctgacccttcccagctgctgtacccagccctcccaggtgccccagagatgaggtcccattcctcccaaccttcctgggagatggagccccacccctcctgtctttctcgggtgatgaggccctgccccctctgtcttccaggctgataaggccccaccccctctgtcttcctgggtgatgaagccccacccttcttggcttccttgggcagaggcccccgccttctcagcttccttgggagatgaggccctgccccccatcttcctgggagataaagccctgcccctctcagctccctccttggaggataaagctacacacatgtgcacacacgcatgtattcacatttttttttttgagacggagtctcactctcttgcccaggctagagtgcaatggcacacactgctcactgcaacctctgcctcccaggttcaagtaatctcctgcctcagcttcccaagaagctgggattacaggcacttgccaccatgccagctaacttttgtatttgtagtagagatggagtttcaccatgttggccaggctggtctcgaactcctgacctcaggtgatctgcctgcctcagcctcccaaagtgctgggattacaggcgtgagccaccatgcccagcctatattcacactctttacctttcctgaaaaggtaggtagttcctggaaacaaggccccaccccaactcacctggtcccatcctatagcaccttctctttgagaccagggccctggtcctgagcccatttctccctgctgccctttccaggcctgtaagatggtcaactacatgcagtatcagcaagtgtgcgacgctctcttcctcatcttctcctttgtcttcttctacacccgactggtcctctttcccacccagtgagtcagccctcccatgggggtcagggaggtgggagggcgtgtctgagattccaggactgcctcaccattggtaccctgccccaaggagctggggatcttggctgggagagttccaggaggaggcagggaagggtgtgccaggcacagggcacggcatatgcaaaggcgcagaggtgagacagagaattattattactcagcgtgcctggaccatgcagtgggaggaagggtcagggctgccagcgcaccaaagtctgcccagtaaatatttgtgggggcctcttgagtgtgctggtaacacagcagaggccacagttcaaagatcccggcccttgtgagcagacattgcatgggtgggagcagatggtaagtgaggcagccacgtgaactgcacagcatgcgaaggagagatttactaacaagaaaataaatttgacgggccgggcgtggtagctcatgcctgtaatcccagcactttgggaggctgaggcgggcgggtcacttgaggtcaggagttccagaccagcctggccaacatagtgaaaccccatctctactaaaaatacaaaagttaggctggccacagtggctcacccctgtaatcccaacactttgtgaggctgaggcaggaagatcacgaggtcaggagtttgacaccagcctggccaacatggtgaaaccttgtctctattaaaaattaaaaattagccggacgtgatggtgcatacctgtaatcccagctactcgggaggctgaggcaggaggatcacttaaacccagaaggcagaggctacagcgaatcaagattgtaccactgcactccagcctgggtgacagagggagactttgtcttaaatcaaattggccaggtgtgatggctcacgcctgtcatcccagcactttgggaggccaaggtggctggatcacctgaggtcaggagatcgagaccactttggccaacacagagaaaccctgtctctactgaaaacacaataattagctgggcatggtggcacacgcccgtaatcccagctactcgggaggctaaggcaggagaatcacttgaacccaggaggcagaggttgcagtgagctgagatcacaccactgcactccagcctgggcgacagagcaagactctgtctctaaataaaaaaaagtcaggaagggagcaggaagtatgggagaggtgggtagttggaattagaatggcaggtaatgcctcgctggcagcgtttgtaccgagagatgggagggaggtgagggacagaaccacgttgatcagaggggaagtgtgttccaggcagagaatagcatgtgcaaagggcctgaggcaagaccatgcccggcatgttagaggaagagcaaggaggcctgtgtggctggagcagagtgggtgagggggagggtaggcaggagatggagtaggccgtgcaggtccttgagggctgtgggcaggactttggctttgaccccgggggagatgggagccatggaggttataagcagagggattcaatctgacctaggtgttctgggtgccctttggcagctgcaggggaaacatcatgggaagtgtgggcaggagtgaggggacccagggtaggcgagagaagtgggcagacttaaggggatgcctctgggatcaggaggtgggaacaagcacagaaggaactgctcgaggcagcaggagctcagccctgctgggtttgaggggtctgtggcctcagaggagacatggagaaggcagtgggcatgccagtctgggcttctggggaaagaggtaatgtaggagttgtcagtccatggctggtatttgcagccagcagcctggatggcatcacctagggaccaggtatggacagagagtctcagtcctcgggcttcctgatgtttgcaggtcgagagaggaagaacagggcccatggagcatgagagtcagattacatccctcctctggctgccatcctccatggctcccacctgtcttggtttcaaggcctgaggagattaggcagaagtggctgtgagatggggagatggtggggtgcggggagccagagagggaaggggcccagggaggagggagggctgctggcaacctgttgtgccagctggtggggctgcagggctgagcactgtggagtgaggaaggcgaggtcgctggtcaccctacagctgattggggggtaggagaaacacagcagctacagccagtactttttgagatggagtcttgctctgtcacctagactggagtgcaatggcgtgatctcagcccaccacaacctccgcctcccgggttcaagcaattctcctgcctcagcctcctgagtagctggaattataggcacacaccaccacacctggctaatttttgtatttttttttttttttttagtagagatgggggtttcaccatgttggccaggctggactcgaacttctgacctcgtgatccacccgcctccacctcccaaagtgctgggattacaggcgtgagccactgtgcccagcccagccagtactttcaaggagttccaaggaaaaaaaaaagcctacagggaaaagaaataagttggtgcccagaggggcagagtaaagagtgagctttttgtttttttctttcttgtgtgaaataacagtgggattggagttgatgataaagaaccagcaggaaggctgggtgcggcggctcacgcctgtaatcccagcactttgggaggctgaggtgaacagatcacttgaggtcaggagttccagaccagcctggccaacatggcaaaaaccacctctctactaaaaatacaaaaattagctgggcgtggtggcaggggcctataatcccagctacttgggaggctgaggcaggagaatcgctggaacctgggaagcagaggttgcagtgagccgagatcacgccattgcactccagcctgggtgacagagcaagactccatctcaaaaaaaaaaaaaaaaaaaaaaaaaaacaagaaccacagctgagtttgagaagaggatgtggtgggagctgggctccaggacagtgtcccaggcaacaagcaaggaggagttcgagggaaggagcagtgctggggaacattctttccaactggcttgggttgcacagtgaaaatgaagccccgcccctcccagcctccgtgggagacaaagccccacctctgtccggctacccgggagatgaggccccaccccttttttactccttgggagatgaggccccgcccctcttaaactctgggagatggagccctgctccctgtgtcttcctgggagatgaggccccaccgcctgccttcctgacatgaagcccctcccctatgaggtgagtaggcagtcgcctgctgatgaaggggaggtgatgggggtctgaggagtagagagaagctgccagagtgccacccaggaaagcagctgagttcataagtacccgcttgggtggggttcatagtcatgaatggccagtcagggagctcgtgtgtgtgttctgctcatttagtacaagcgagagggggcctcgcgtgcccagctcaagagtgttaggtatcatggggtggggggcactagggagccataggtggttatggagcagggaaggccatgccagttagaaattcttaggactgggggctacagcggctggtcaaaccccagcctcctcctctccccctggctgtaggatcctctacaccacatactacgagtccatcagcaacaggggccccttcttcggctactacttcttcaacgggcttctgatgttgctgcagctgctgcacgtgttctggtcttgcctcattctgcgcatgctctatagcttcatgaagaagggccaggtatggctggacctccccgggggccccagccctaagctcctccttcctccctgctctgagctccatccctctctctgttccccagatggagaaggacattcgtagtgatgtagaagaatcagactccagtgaggaggcggcggcggcccaggaacctctgcagctaaagaacggggcagctggagggcccaggccagcccccactgatggccctcggagccgggtggccgggcgtctgaccaacaggcacacaacagccacatagccgggcggggctggctgtaaggggttgcccccccgccagtgccttggatatttctggggtgactggactggcgcccctgggccacctttctggagacagggagggccccacccggggtgggtgggaaggctgatgatctgtctccagccccttccttctgcccacccacccttcttccctctgggcaactggacagatctgggagccagcagctggatgctgtggctggccagagacacctccaggctgtggcctgggggctggggggagccccaggctgaaaagggtccaattaaaacaaatggagccaaattttctgcctgagaacttgggtccctatcaaagttccttcttcatccccagagacccccgagggagccaggcctctgcttacataccccacctacgggatactcactgccacccaaggatgcagggccccaggggccccagacagcaacagagctcagagaccacccgctccccacgctgttcccagatgagcccctgactcgccagccagtgactcaaacaagcccctccctccacccttagggtacccttgggtcagcctctcaaagacccccttgcagactagctctgaaaggtcaagtcctttgcccaagctcacaggtaggtcacagaccaggcctgtctctgcagtcctttcttaagtccggtagattgcccacctttgtggtccctggatccttccttgggacagtggagggagtgggctgaaatcccacagacttcccaagggttagcctggggaggtcactgtctcttcaagagctccaaaaataaacagaggccaggcctggtggctcacacctggaatcccagcacttttggaggctgaggcagggggatcacttgaggtcaggaggtcaagaccagacttggcaacatggtaaaaccccatctctactaaaaatacaaaaactagcagggcagggtgacccacacctgtaatcgcagtcacctgggaggctgaggcaggagaatcgcttgaacccgggaggtggaggctgcagtgagccaagatcacgccactgcactccagcctggtcaacagagcaagactccatctcaaaacaaaacaaaagccaggcgtggtggctcgcgcctgtaatcccagcactttgggaggccgaagcgggcggatcgtgaggtcaggagatctagaccatcctggctaacatggtgaaacctcacctctactaaaaatacaaaaaattacccaggcgtggtggtgggcgcctgtagtcccatctactcgggaggctgaggcaggagaatggcgtgaactcagaaggcggagcttgcagtgagccaagatctcgcgccactgcactccagcctggttgacagagcaagactgtctcagataaacaagaaattggacaacaaagtattggagagaatgtggggggtcaataatctcacattatcgggggaatataaattgttaccaacactggaaaaaccattcagcattgtgtataatagttgaccttttataaagctcaaaagcaacccaaatgagataatatataggcatgaatacctagctagtagaactgtaataaaatataaacacaaaattcaaattagtaaattacctttgatctgggaaggtaagggaatgggattcagatagatatcaattactatcactgttctagtttttgaagtgaggtgaagttttttttgttttttgagatggagtctctttctgtcacccaggctagaatgcactggtgccatcttggctcactgcaacctctgcctcccaggttcaagtgattctcctgcctcagcctcccgagtagctgggactataggcacgtgccaccacacccgggtaatttttgtatttttagtagagaggtggttttgtcacgttggtcaagctggtctcgaacgcctgacctcaaatgatccacccgcctcagcctcccaaagtgctggaattacaggcgtgagagaggtgaagtttttgaagtgaagtgacacactcattaaatacaatttttaaagggatatgacaagctacaaaatggaagaaaatatttgcatatgatatatctgaagaggttctagcatccaagatatataactcttacaactcaataacaacaaaaaccctaatttaaaaaatgggtgactgggcacggtagctcatgcctgtaatcctagcactttgggaggccaaggcaggcaggtcacctgaggtcaagagttagagaccagactggccaacatagtgaaaccccatctctactaaaaatgcaaacattagccaggcgtggtagggggtgcctgtaattccagctactcgggaggctgaggcaggagaatcacttgaacctgggaggtgcaggttgcagtaagccgagatcatgccactgcactccagccagggcaacagagccagactccatctcaaaaaaaaaaaaaaaaaagggggggggggcaaagagaccaggtgtggtggctcacccctataatcccagcactttgggggcttaggcaagaggatcagttgagtccaggaattcaagaccagcctgggaaatatagcaagactcccttctccacaaaaaaagaaaaaaataggcaaaggacttgaatagaaatttctcgactgagtgtggtggctcacacctgtaatcccagcactttgggaggctaaggcaggtggatcacctgcggtcaggagttcgaaaccagcctggccaacatggtgaaacccatctctactaaaaatacaaaaattagccgggcatggtgacacgtgcatgtaatcccagctactcgggaggctgaggcaggagaatcgcttgaacccgggaggcagaggttgcagtgagctgagagcgcgccactgcacttcagcctgggcaacaagagcaagactccatctaaaggaaaaagaaaaagaaaaaaaaaattcccaaaaagaaatggccaataagcacatgaaaagatattcaacattgttagtcattaggaaaatgcaaatcaaaaacacaatgagaaaccactttacatccacaagagtgggtataataaaagaagtgttggccaggtgcagtgtaatcccctcatgcctgtaatccccaaactttgggaggctgaggcaggtggatcacctgaggtcgagacttcgagaccagcctgaccaacatggagaaacccctctctcctaaaaatacaaaattagccgggcatggtggtacatgtctgtaatcccaggtacttgggagactgaggcaggagaatcacttgaacctgggaggcagaggttgcagggagccaagatcatgccactacactccagcctgggtaacaagagcgaaactctgtcttaaaaaaaaaaagtgttggcaaggatgtggaaaaaatgaaacaactgtattcactgctggtggaaatgtaaaatgatcactgtggaaaatcgtttggtggttcctcaagaaattaaatagaattactatatgatccagcaattccactcctaggaatagacccaaaagaattggaagcaggtactcaaatatttacacatgaatgttcatagcagcactagtcacaataaaggtagaaacagctgatcacaatggttcactcctgtaatcccaacactttgggaggtcgaagtgggaggattgcttgagcacaggagttcaagaccagcctggacaacatagtgagacatggtctctgcaaaaaaatagaaaaatcagcagggtgtggtggcatgcacgtatactcccagctactcaggaagttgagtgagaggattgcctgagcccaggagtacaagactgctgtgagctatgatcatgccactatactccagcctgcgcaacagagagaccctgtctggaggggtggggggagaaaaaaacaccatagaaacaacccaaatgtccaataacaaattgtagtccatccatacaatggactactactcagccatgaaaaggaatacagcactcacatatgctgcatgtgaatgaaccctggaagcattatgctcagtgtaagaacccagacataaaaggtcacacattttatgattccacctatatgaaatatccagaagaggtaaacctataaaaataaaatgtatatttatagctgccgggggcttcagggtgaaggcataggaagaaactgtttaatgggtacggagttttatcttgcagcggtggaaatgttttggaactaaagtcgtggttctacaacattgcaaatgcactcgatgccactgaactgttcactttaagatggttcgttatgtaaatttcatcttaataaatgcatgaagaaagggatttgtatgtatcaactacagtgtctcatgaagcaaagattataattattccatttacctggtgtttccctatccaataattcccatttcctccaaaaaaacaaataataggaacctcatgggttgaaagagagcccataatgaagattagaaaatacactcctatagatgaatagcaaaggccgggcacagtggctcacgcctgtaatcccagcactttgggaagtcaaggtgggcggatcacgaggtcaggagatcgagaccatcctggccaacatggtgaaaccccgtctctactaaaaatacaaaaattagctgggtgtggtggcacatgcctgtaatcccagctactcgggaggctgagacatgccagcactccagcctggcaacagagtgagattttgtctccaaaaaaaaaaaaaaaaaaaaaaagatgaatagcaaaaatataaaaatattacatgtcaatgtttgtggagtgtagcttaagcaatcctttggaggaagtttgcagcctaacaggcttatattagaaacgaaaaaaaaaaaaaagcagcctggcgtggtggctcacacctgtaatcccagcactctgggaggccaaggggggtggatcatgaggtcaggagtttgagatcagtctgaccaacatggtgaaaccccgtctctactaaagatacaaaaaaaaaaaaaaaaattagccagcagtggtggcacgtgcctgtaatcccagctactcaggaggctgaggcaggagaatcgcttgaacccaggaggcagaagtttcaatgagccaagattgtgccattgtactccagcctgggcaacagggtgagactcaaaaaaaaaaaaaaaaaaaaaaaaaaaagaaaaagctcaaaaataattagctaagcatttaagaagattttaaagaacagtaaaataagctcaataaaagaaaaaacaggataagtgttaaaattaggatcatcaaacctaaaagttagttatttgaatgactaacagacgaacatctggcaagattaataaagaaaaataaaagaagtcacagaaaaaaatatagagacaggccaggtgcggtggctcatacctgtaatcccagcacttctggagaccaagggagaggatcacttgagcccaggagttcaagatcagcctggcaacatggcaagacccccatctctgcacaaaatttaaaaatcaggcatggtggtatgtgcctgtagtcccagctactcaggagctcaaggcaggaggaccacttgaaccaggagttcaaggctgcagtgagccgtgatcttgccactgcactccaacctgaggaatagtggaaggccccaacactaaaaaacaaaaataaagcatcatacatgtcaaatgttatatttaatgtcatatttaattgttgggtacataacccttaaggtaagaaataagacaatagctgctatcgccacccttattcaaaattattctgggagttctagttaacaataaatcaaaaaaggccgggcgcggtggctcacgcctgttaatcccagcactttgggaggccgaggcaggcagatcacctgaggtcgggagttcgagaccagcctgaccaacatggagacaccccatctctactaaaaatacaaaaaaattagccgggtgtggtggcgcatgcctgtaatcccagctacttgggaggctgaggcaggagaatcacttgaacctgggtggcggaggttgcagtgaggcgaggtcacgccattgcattccagcccaggcaacaagagtgaaattccgccaattaaaaaaaaaaaaaccgtaaaacaaaaaaagatatcagtaggagaaataaagagaataaaactgcccattattagtctatgacatatctatatcaaaaacccaggatgtagaaggcagcacaagataacagaatagaaggctccaccaaccatccctccaacaaggacaccaatttaacagctacacacaaaaaagcactttcccaagaaccaaaaatcccagccgggagcagtggctcatgcctgtagttccagctactcaggaggctgaggcaggagaatcacttgaacccgggaggcagaggttgcagtgagccgagatcgcgccactgcactccagcctgggcgacagagcaagactctgtctccgaaaaaaaaaaaaaaaaaaaaaaaaaaaaaaaaaaaaaaaaaaaaaaaaaaaaagaagaaccaaaaatcaggtgagcactcacagtacccggttttaactttatatcactgaaagacacactgaagaaacacactgaaagtcctgaatctctgacaccacctctccgccacccctggcagcatggtgtggagagtgcctttgtgtgttggggagagggagggggcagcaattgtgaggcatggaacccagcgctgtccttttagagcagaaagaaaaacccgaccacactcagctgatgcccacccatagagggtgtgggcggcaagccacccaggtgccgaggcaagagactgagggcacaagttgttccagtaaaataaaaaatatatataaaataaaaatagttacaccagaagacaagagtgcgagccctctgttatgcccggacagggccactagagggctccatggtctagcggtaatgccggcgcctgggaaggcacccgttacttagcagaccgggaaagggagtctccctttccttgggggagttagagaagactctgctccaccacctcttgtggaaggcctgacatcagtcaagcccccaccatccccacctgccaacagccatccagaggcctaacagtctagcctctgtcatgctgtgcttcagcggtcacgctcctgtttcactttcatgttccaccctgtacacctggctctgccttctagaaaacagtagcagaattaagtgaaagtattaagccgttgacctctccaagaaataatgacataagctgtcccctctctctgcctcggctaccaaacagggaagggccccctgtccagtagacacatgactcacgtgaccttacctatcactggagatggctcaacactccttaccctgcccccttgccttatatccaaaaaataacagtgcagccaggcattcagggccactaccggtctctgcgtcttggtggtagtggtcctccaggccccagctgtctttccttctctttgccttgtgtctttatttctacgatctctcatctccacacacgaggagaaaaacccacaggccctgtagggctggtccctatagagggggcatttaaaccagccctaacaagagggaaattatggatcccagtggaatttgagttcctgcaaactttgcgacccaccatgggctaaagtgctctgggtctctaagtaaatttgaaagtcagtctaggctatcagtgcaactcctaggcaagtcctagtgaggtagaagataagatttgacttcagaggtggggctcagacaccagaccatattgaggactagctaaaacaggtgaaggaaaagggagggggaagcagctttcgatgagacatgcctgccagtgtgccgtgtcaatttcacattaccatgctaacatcaaggaattactgcccctttccaggcaatgccccaatgattagtacccccttccctaaaagtttctacataaactgccccttaatctgcatgcgattaaaagtgggtatatgccaggcacagtggctcacgccagtaatctcagcactttgggaggctaaggcaggtggatcgcttcagcccaggagttcaagaccagcctggccaacatgtcaagaccccatctctgctaaaaatacaaaaactggcggggcagggtggctcatgcctgtaattccagcactttgggaggttgaggaggacagatcacaagctcaagagatcgagaccaccctggctaatgcagtgaaaccccgtgtatactaaaaaatacaaaaaattagccaggcctgatggtgggcacctgtagtcccagctactcaggacgctgaggcaggagaatggtgtgaacccaggaggtggagcttgcagtgagccaagatcgtgccactgcactccagcctgagcgacagagtgagactccatctgaaaaaattagccaggcctgctggtgcccgcctgtagtcccacctacttgggaggctgaggcagaaaaatcactggaacccaggaggcggaggttgcagtaagctgtgatcacgccattgcactccagtctgggcaacatgagcgaaactccgtctcaaaactaaaagaaaagatgaagatgaaaagaatacctttatggaaaaatataaaatgcaaaacttgcaccaagaggtaccaaaaaactttactaaatccataaatattaatgaaatggaaataacttgggggagggggcagacaatatggttcatgcctgtgatcccaacattttgggaggctaaggtagacagatcacttgaacccaggtgtttaagacccatctggtcaacatagcgaaacctggtctctacaaaacaatttaaaaattaggccgggcgcggtggctcacacctgtaatcccaccactttgggaggccgaggtgggtggatcacaaggtcaagagatcgagaccatcctggctaacatggtgaaaccctgtctctactaaaaatacaaaaaattagttgggcgtggtggcgggcacctgtagtcccagctactcgggaggctgaggcaggagaatggcctgaacccgggaggcggagcttgcagtgagccgagattgcgctactgcactccagccttggcgacagaggaagactccatctaaaatttaaaaaataaaaataaataaaaattagctggatatggtggtgtgtgcctgtagtccccactactcgagaggctgaggctgaaggatcgcttgaacccaggaggtcaaggctatagtgagtcatgatggtgccactgcactccagcctggttgacagagggagaccctgttgaaagaaaaaaatgagagaaagagaggaagggaaggggaagggaagaaacaaactaccttccgctaaaggacaaaacccagaggatttttcaaccaaagtttttggggtttttttttttttttttttttttagacggagtcttgctttttttttttttgagacagcgtctcgctccgtcgcccaggctggagtgcagcggcgcgatctctgctcactgcaagctccgcctcccaggttcacgccattctcctgcctcagcctcccgagaagctgcgactacaggcgtccgccaccacgcctggctaatttttttctatttttagtagaaatggggtttcaccatgttagccaggatggtctcgatctcctgacctcgtgatctgcccgcctcggcctcccaaagtgctgggattacaggcgtgagccaccgtgcccggccccaatcaagttttatcaacatttcaagtaacagttatttctcatctaattcaggctgataccaagaagagggggagggaaaaaaaagagggaaagggggagaatatccaatttcttttatttttaaattttttattttggagacagggttttgctctgttgcccaggctggaatgcagtggtgtgatcacagatcactgcagcttccaacacttgggctcaagcaatcctcctgcctcagtcttcccagtagctaggatgacaggtgcacacaaccacacccagctaatttttttatttttggtagagattaggccttgctatgttgtccaggatgatctgaatctcctagcctcaaaccatcctcccacctcggcctcccaagcactaggattacatgtgtgagtcaccaaaatgagtacagggcttccttttggggtcatgaaaatattctggcagtagatagatatggttgcactgcactgtgaatgtaccaaatgccactgaatcattcacttcacaatggttaattttatgttatatgaatttcactttgataaaaacagatgtggccgggcacaatggctcatgcctgtaatcccagcacttgagaggccaaggccagtcgatcacctgaggtcaggagttcgagaccagcctaaccaatatggtgaaaccccatctcgaatctctactaaaaatacaaaaattagccaggcatggtagcatgcacctgttgtcccagctacaggaggctgagacagaagaattgcttgaacctgggaggtggaggttgcagtgagccaagatcacaccactgcactccagcactccaggttggatgaccgagcacaactccatctcaaaaaaaaaaaaaaaaaaaaaaaaaaaaaaagaggaggccaggcactgtggctaaattctatcatcccagccctttgggaggccaaggcaggtggatgacttgaggctaggagcttgagaccagcctgggcaacataatgagaccccatctcacaaacaaaaaagatttcttggccaggaatggtggctgacgcctgtaaccccagcacttttgagagtctgaggcaggtggatcacaaggtcaggagttcaagaccagcctagcaaacatagtgaaaaccccatctctactaaagatacaaaaaattagctgggcgtggtggcacgtgcctgtaatgccagctactcgggaggctaaggcaggagaatcactctaactcaggaggcagaagttgcagtgagctgagatcacagcaccactgcactccagcctaggcaacagagcgagactctgtctcaaaaacaaaaaacaagaacaaaaacaaacaacagttctagagatgggtggtggtgatgagtgcacaacattgtaaaaatactgaatacctttgaagcccactttaaaattgttaaagtggtcaattttatgttatttttaggtataatacttacgtactttttgtatttttttctattatgtattgatatgtatatttaacagtagaaaaaaaatgatggtcactcgatcggaaacagaaaaggttaaagcaaaagtaaaatgcatgaaaaccagggagaactgccagataagcacatggtcagtgaccctggattagcccgaggctgactgggtgttggacatggggaacgaccaccacctaggggcaacttgccatctgccgctatgttctttctgggacttggaaaaacatgcattactaggaacttcccctactgttattccctgtttcccccgccaccccgcccgagacagagtcttactctgtctcctaagccggagtgcaatggccgatctcggctcactgcaacacccgcttcccgggtccaagcgatcctcctgtctcagcctcctgagaagctgggattataggcacaggccaccatgcctggctaatgtttgtatttttagtaaagacgggatttcgccacgttggtcaggctggtctcgagctcctgacctcaagtgatccgacagccttggcctcccaaagtgctgggattacagacgtcagccaccgcacccggcctgttatttcctcttaatactgacatcatcctcctgtttaccaatctttgtcacagaccaggtggcatctctgagaaaacagaaatcagcaggagagaccttccagagccactgccctccatcaacctgcagacctgcatcaggacccagacgcagtggctcttcctcttgccctgtgagaatcaatttgccctggatgcagcaaaaccacgcccccttctccaccaactcctccaccccttcatgggcctagacaagcacctacctcaacaacctccccgcacccctggagcattcctatcagcacacaaataggttgatgcatttttccctcctttgtttttattattaaggtgaaactcacacggcataaaattaacctttgttttttttcctttttttttttttgagactgagtctcgctgtattgcccaggctggagtgcagtggcgcgatctcggctcactgcaacctctgcctcccaggttcaagcgattctcctgcctcagcctctcaagtagctgggaccacaggctcgtgccacgacacctggccaattattgtatttttagtagagacagggttttgctatgttggccaggctggtctcaaactcctgacctcaagtgatccacctgcttcagcttcccaaagtgctgggattacaggtatgagccaccatgcccagccccttctttttttgagagagagagagagagacacagacagacagagtctttgtcacccaggctggagtgtagtgactcgatctcagctcaccacaacctccaccgcccgcctcagcctcctgagtagctgggactacaggcacacgccaccataccctgctaatttttgtattttttgtacagaaagggtcttgctatgttgcctaggctggtcttgaactcctggcctcaagggatcctcctgccttgacctctcaaattcattttcttctgagggcttctattccatgcaaaacttctattaagtaaatctgtatcctctcctgttaacctgtttttgtttgttttgttttctgagacagtcttgctctgtcacccgggctagaacacagtggcacaatctcagctcactgcgacctccgcctccagggttcaagcaattctcctgcctcagcctcccgagtagctgggataacaggcaccagccagcacgcccagctaattttttgtatttttagtagagatggggtttcaccatgttggccaggctggtctcaaactcctgacctcgtgatttgtcgacctcgtgatttgcctgcctcggcctcccaaagtgctgggattacaggcgtgagccactgtgccatgcctggccctatttttttttttttttttttttttttttttttttttttttttggtagggggagatggagtttcctcttgttgcccaggctggagtacagtggtacaatcttggctcaccacaacctccgcttcctgggttcaagcaatttcctgcctcagcctcccaagtagctgagattacaggtgcccaccacgacacctggctaatttttgtatttttagtagagacagggtttcaccatgttggtcaggctggtctcgaactcccgacctcaggtgatccagctgccttggcctccaaaagtgctggaattacaggcgtgagccaccacgccctgcctgttaacccattttatgtcaacttaataattctcaggcctagagggatcctaagagaacagaggtgaatttttgctgccggacctgctgctatgaactttaatctatgagtttttttttttttctcgagttagtatcttgctctgctgcccaggttggagtgcagtggcaagatcagggctcactgcagcctcaaccttctggcctcaagcattccacctagttcagcctcctgagtagctgggactacaggcaggcaccaccacacccaaataatttttgtatttcttgtagagatgaggtctcactatgttcccaggctggtctcaaattttcgggctgaagtcatccacccaccttggcgtctcaaagtgctgggattacaggcgtgaaccatcacgcccaaccctttttcctttttaagatacagcagggtctcactctgttgccctggctggagcacagtggtacaataatagctcactccagccttgaccaccgggactcaagcaatcctcccatctcagcctcccaactagctaggattaaacatgtgagccaccatgccccgcttccatctctttttcattttgtcttgtttttttttttgtacagaatattgctctgttgcccaggttggagtgcagtggcatgatctctgctcactgcaaccttctcccaggttcaagcgattctcctgcctcagccacccgtgtagctgggattacaggcacccgccaccacacccggctaaatttttcatttttacaagagaccgggtttcaccatgttggccagggtggtcttgaactcctgacctcaagggatctgcccgcttcaacctcccaaagtgttgggattacaggcgtgagccaccgcacccaacttttcatctgttttctgattcttccttagctccaaaacatctaaggtttggctgcattcactcctctccagcccacagacgcccaactgggccaattcccaaattcatcattctagcccaaaccctagggtccagtgccttctcagcctctgccacaaggggtcctcgcaggccgctccagtgttgcaggtcccaatctggactcctaggggtttcccacccaagccttgtccgagcgtcctctccctctcagttagcaccatcttcccaggctctgctctgacagttctgaggcatccacgcctcctcccacctgcatccaatgtgtctgccaatcctacagcccccatcgccttttccttcaaaacagacctagaagccagttatcactgaccacctgcacttgccagctaggtccagccccttcctgacttctggggatcagtgcagttgtcccctccctggtctccctgcaggttctgttctccccactgcaaccagaaacaccttctctttttttttttttttttttgagacagagttttgctcttgttgcccaggctggagtgcaatggtgcaatcttggctcactgcaacctccgcctcccgggttcaagcgattctcctgcctcagcctccctagtaactgggattacaggtgtctgccaccacgcccggctaattttttgtatttttagtaaagacggggtttcactatgttggtcaggctggtctcgaactcctgacctcaggtgacccacccacctcagcctcccaaagtgctggaattacaggcgtgaaccaccacgcccagctctttcgttttcttttgagacagagtctcgctctgtcgccctggctggagtacaatggcatgacctcggctcactgcagcctcttgcctcccaggttcaagcgattctcctgcctcagcctcctgagtagctggaattacaggcatgcaccaccatgcctggctagttttgtacttttagtagaccgggttcgaccatgttggccaggctggtctcgacctctcaaagtgctgggattacaggagtgaatctccgcaccagctttttttttttttttttttttttttgagacaggaacttgctgtcacccaggctggagtgcattggcggatttcggctcactgcagcctctgcctcccaggttcaagcaattcttctgcctcagcctcctgagtagctaggattacaggcatgcactacaccacatccagctaatttttttttttttttttttaaagacagtttccctcttgttacccaggctggagtacaatgacaagatctcggctcactgcaacctctgcctcctgggttcaagcagttctctagcatcagtctcccaagtagctgggattacaggcgcctgccaccacacccagctaatttttgtatttttaggagagacagggtttcaccatgttggccaggatggtctagaactcctgacctcaggtgatctgcccacctcagcctcccaaagtgctgggactacaggcatgaaccagtgcacccagctactaatttattttagtagagatggggttttgccatgttgtccaggctggtctcgaactccagtcctcaggcgatccacctgccttgatctcccaaagtcctgagattacaaatgtgagccaccgggctcagccctattttttcagggctattttgttcatggttagaaccaggaacagcactgatacatagtagcattcaacagatatattttattgttgttttctagagacaggatcttgctccattgcccaggctggagtgcaatgggtgatcatagctcactgtagcctccatctcccaggctcaagcaatcctcccacctcagcctcctaagtagctgcaactacagaaacttcaggtatgtgccaccatgcccagctattttttttgttttttagtataaatgagatctcactatattgcccaggctgatctccaacacctgggttcaaacagtcctcatgcctcagcctcccagagtgcttggataacaagtgtgagccgctgcacctgaccatcaacaagtatcttttttaaccagcttttaccagtcggggtctggccatgttgaccaatctgtatgaaacatttttttgttttgttttaaattagctgggcacagtggcgcagacctgtagtcccagctaatcaggaggctgaggcgggaagatctcttgagcctgggaggttgaggctacagtgagctataattctataactgcaccaccgtactccagcttgggagccaaagcaagaccctgtctctaaggaagaaaaaaatgaaaaaaagagtttctgagctatcatactagcttcagtttgctagggtggccataacaaaataccacagcttgggtaggttaaaaacagaaacttacatttctggaggctgacgtccaagattaagatgtcatcagggttggtttctgcttttcatttttgaaacggagtcttgctctgctacctaggctggagtgcagtggcaccatcttggttgcactgcaacctccacctcccagattcaagcaattctcgtgcctcagcttccagagtagccccaggttcaagcaattctcgtccctcagcttctcgagtagctgggattacaggcgcccaccaccacgcccggctaatttttctatttttagtagagatggggttttgccgtatttccgggatggtctctaaatcctgacctcaaatgatcacgcctgggattacatgcgtgagccaccgcacccggcccagagctggtttctactgagcccccttgctttgtcttacagagccgcggccgcctcctgcgtgccctcacatgctctcttctctgcatgcacccttcgtatttcttagtgtccatatttcttcttcttgtagggacaccaggcagattggatgaggacccgatgtagcagtgtatccagaattggtggggtcttggtctcactgacttcaagaatgaagccacagaccctcgtggtgaatgttacagttcttaaaggcagcgtgtccacagtttgttccttctgatgttcggatgtgttcgtagtttcctccttctggtgggttcgtggtctttccggctcaggagtgtagctacagaccttttgcagtgagtgttacagctcataaaggcagtgtggacccaaacagcgagcagcagtaagacttattgcaaagagaaaaagaacaaagcaaccacagcatgaaagacaacccaagttgccactgctagctggggcaacctgcttttattcccttatctggccccacccacatcctgctgattggtccattttacagagagctgacaggtctgttttacagagagctgattggcccattttgacagggtgctgattggtgtgtttacaatccccgagctagacacaaaagttctccaagtccccacagagcactgattggtgcatttacaaaccttgagctagacacagggtgctgactggtgtatttacaaaccttgagctagacacagagtgctgattggtgtatttacaatcccttagccagacataaaggttctccaagtccccaccagattagctagatacagagtgctgattggtgcaattacaaaccctgagctagacacagggtgctgattgatgcatttacaatccctcagctagacataaaggctctccaagtccccactagactcaggagcccagctggcttcaggcagtggaacccgcagggggtcagaggtagagctgcccaccagtcccttgccacacgcctggactcctcagccctcttggcttgggcagtcgatgggaccaggcgtcgtggagcagtgggtggcgctcatgagggaggctcgggcggagcaggagcccagggcagggggaagcctcaggcatggggggctgcaggtcctgagccctgcccagccgggaggcagctgaagccccgcgagaattcgagtgcagcgctggcgggccggcactgctgggggacccggcacaccctccacagctgctggcccgggtgctaagcccctcaactgcctggggccggtggcaccggctgtccgctctgagtgcgggggcccacgcccacccggaactcgcgctgtcccacgagccccttgcgcacagcccgggttcccgcccgcgcctctccctccacacctttagcaagcagaaggagctggctccagcctcggccagcccagagagggactcccacagtgcggtggtgggctgaagagctcctcaagcgcggccagagtggacgcggaggcccaggaggcaccgagagcaagcgagggctgccagcacgctgtcacctctcagcagcttcttttttttttgagacagggccttgctttgtctcccaggctggagtgtagtggcgctaacagctcagtgcagcctcctggaatcaagcaatcttcccacctcagcctcctgagtagctgggaccacgggtgcacaccaccaagtcctgctaattaaaaaaattttttttcttttcttctttttgagacggagtttccctcttgttgcccaggctggagtgcaatggtacaatctcggctcactgcaacctccgcctctcagattcaagcaagtctcctgcctcagcctcccaagtagctgggattacaggcatgtgtcaccatgcccacctaattttgtatttttagtagagacgggtttcactatgttggtcaagctggtcttgaactcccgacctcaggtgatccacctgcctcagcctcccaaagtgctgggattacaggcgtgagccaccacacttaggctttttttttttttttttttgaaacagactctcactcttttgcccaggctggagtgcagtggtgggatctttggctcactacaacctctgcctcctgttctcaagtatttctcgtgcctcagcctcctgagtagctgggattcaagtgtgcaccaccacaccgagctaattttttgtatttttagtagaggcaggctctccctatgttgcccaggctggtttcaaactgctggccttgtgcaatccacccacctcagcctcctgaagttctgggatgacaagtgtgagccaccacacctggccttaatcacccctttaaagaccctgtatccggcctggcatggtggctcacgcctgtaatcccagcactttgggaggccaaggtgggtggatcacctgaggtcaagagttcgagactagcctggccaacatagtgaaactctgtctctactaaaaatacaaaaattagctgggcgtggtggtgagcgcctgtaatcccagctacttgggaggctgaggcaggaaaatgacttgaacccgggaggcggaggttgcagtgagccgagatcgcgccactgtactccagcctggtggcagagcaagactctgtctcaaaaaaaaaaaaaaagaaattaaccgctgctcacagctgtgctagcttacaggaacaaaggccaagtgccaataaccacaaatgagccacaagatgagagctgacctcagcagtgctccataggcctgattcctcactccactggcataataaaatctccacagccagggtgcactggctcccagctgtcatccaagcactttgggagggtgagaaaggcggctggtctcaaactcctgacttcaagtgatcacccacacctcagcctcccaaagtgctgagattacaggcgtaagccaccacacccggactataacatccattcttttagggagccccagaacctgtgaaattaatctctgctctggccgggcatggtggctcacacctgtaatcccagcactttgggaggctgaggcgggtggatcacgaggtcaggacatcgagaccagcctggccaacatggtgaaacctggtgtctactaaagatacaaaaaagtagccaggcatggtggtgtgtgcctgtaatcctagctatttaggaggctgaggcaggagaaatgcttgaacctgggaggcagaggttgcagtgagccgagatcacaccattgcactccagcctgggcaacagggcgacactctgtctcaaaaaaaaagaaattaacccctgctcacagctgtgctagtttacaggcatgaaggccggatgccattaaccacaactgagccacaagatgagagctgacctcagcagtgctccatctgcctgaatcctcactccatgggcagagtaaaatctccacagccagggcacaatggctccaagctgtcatcccagcattttgggagtgtgaggagggaggattgcttaagtcagagagttcaagaccaccctgggcaacatggtaagaccctctcttggcctgtaatcccagcacttcaggaggccaaggtgggcagatcacgaggtcaggagtttgagaccaccctggccaacatggtgaaaccctgtctctactaaaaatacaaaaaaaaaaaaaattagccgggtgtggtggcacgcgcctgttactactcaggaggctgaggcaggagaattgcttgaacccgagagtcagaagttgcagtgagctgagattgtgccactgcactccagcctgagcgacacagcgagactcagtctcagaaaaaaaaaaaaaagaccctctctctacaaaaaataatgtaaaaattagccgggcgtggtgatgcatgcctgtagtcccacctacttgggaagctgaggcaggaggattgcttgagctcagaaggtcgaggctgcagtgagctacgatcgcaccactgtacttcagcctgagcaacagagtgaggtgctgtttcaaaaaaaaaaaaaaaaaaaagctgggattatatgggtcacacctataatcccagctactcaggaggctaaggcaggagaattgcttgaacctgggaggcggaggtggcagtgagctgagatcgccccactgcactccagcctgggtgactgatcgagactctgtctcaaaaaaagaaaaaccaaaaaaaaaaagtcttcagtggggagaggtgcactttgctaagcacatataatgccaggtacaaaagaaaagaaaggctgaacacttcagtgccccctagaaagccccacctctttccaggaatccccacccccagtctgcatctacatgccctaggaaactttaaaactcccctcatcacacctgcagggagtaggcactttgagcaggagttcctccctttctccattcattgattgacgaataaagtttctatcttgctttactgaacctggtcttgttctgttggtgcaaatggcaacccgcagagaaaggactcattagtctcaaacaatccccttaagagtgggtaacagcggacaccatggctcacacctgtgatcccagtgctttgggaggctagggtgggaggatcacttgagctgaggagttaagagaccagcctgggcaacgtagaaagacctcatctctaaaaaaaaaaaaaaaaaaaaaaaaaaggcagaggggaggggggcgggcgtggtgtctcacgcctgtaacccctgcactttgggaggccaaggcaggcaaatcacctgaggtcgggagtttgagaccagcctgaccaacatggagaagccccgtctctactaaaaatacaaaaaattagccaggcatgatggcacatgcctataatcccagctactcgggaggctgaggcaggagaatcacttgaacccaggaggcaaagtttgccgagatggagccattgcactccagcctgggcaacaagagggaaactccaccaaaaaaaaaaaaaaaaaaaaaaaaaaaaaaaaaaaaaaggcgagggggaggagggagactttaaaaaaagaaaaataaaaaaagttttttttggccaggcactgtggctcacgcctgtaatcccagtactttggaaggccgaggtgagcggattgcctgaggtcaggagttcgagaccagtctggccaacatggtgaaaccccgtgtctactacaaatagaaaacaaattcgcctgatgtgttagtgcaggcctgtagtcccaggtactcaggaggctgagacgggagaatcgcttgaacccgggaggcagaggttgcagtgagccgagattgcaccactgcactccagccaggtagacagagcaaggctccgtctcaaaaataaataaataaataaataaataaataaataatgtttttgagatagtctcaaaagggtgttcaggcccttatgtgttccccccactcacacacacacacacacacacacacacacacacacacacacacaggatctgggctgacctggactccactgaatccacagaatacagcatcggcaacattgacccagcagtctctctgctttgtgtgttggggaaccccaagtcaccgtggcaggagtgtggccaccttgctcaggagtccacgtggagaggccacatggagaggtcagctatcccagacatgacagaccttctggatgggacatccagccagcccggcccccagatgatggcagccactgtcacatggaacaaatgaacccccagtgagcctggtcagcccagagccaggagagaggatgcgacaacaggtgtttggagccagtgggcatggggcggtttgctccactgagaacaagaatgcatgacagtcaggacggtccagagcctagaggtccacttaggtggcatgtggcacccacaccagcctcacagccgggcacacatatccctgacataccctgttgtccgtcgaggctgactcgtgacagagaaaacgttagagaaaaaacctggctggatgcagtggctcacacctgtaatcccaacgctgtggggggccgaggtgggagaattccttgagatcaggtgttggaggccagcctgggcaacatagaccaaccctgactttacaaaaataaaaaattagctgggtgtgatacatgtgactgtaatcccaaaactcgggagactgaggcaggaggatttttcttttttttgagatggagtcttgctcttgtcacccaggctggagtgcaatggcaggatcttggctctctgcaacctctgcctcccaggttcaagcaattctcttgcctcagcctcccaagtagctgggattacaggcgcctgccaccacacccggctaatatttctatttttagtagagatgtggtttcaccatgttggccaggctggtctcgaactcctcacctcaggtgatccgcccaccttggcctcccaaagtgctgggattacaggcatgagccaccgtgcccagcccaggcagatctcttgatcccagttcaaggctgcagtgagctgtgatcacactactgcactccaacctgggcaacaggtccatctgagtccatctctaacggtcccagggaggtcactcccctgcaaggaggctactgtggcccccaacatcccattcagagatttagaagctgaggataagggaggaactttgccctgtcacccagaagtcagggtgtgaattaactttaccggtcaccaacctttttggcagcagggactggtttcatggaagacaatttttccacggaccaggggtggggatggtttcaggatgattcaagtacattacttgtttttgtttgttttttgagacagtcttgctgtgacacgcaggctggaatgcagtggcctgatcacggctcactgcagcctggacctcccaggctcaagcaatcctcctacttcagcctcccaagtagctgagactacaagtgcacaccaccacccacagctagttaaaaaaaaatgtataggccaggcacagtggttcacgcctgtaatcccagcactttaggaggccgaggcgggcggatcacctgaggtcgggagttcaagaccagcctgaccaacatggagaaaccccttatctactaaaaatacaaaattagccaggtggggtggcacatgcctgtaatcccagcaacaagaacgaaactctgtctcaaaaaaaaaaaaaaaaaaaaaatttgcagagatccctatgatgcccaggataaataataaaaccttttttttcttttttgagacagagtctcactctgtcacccaggctgcagtacaatggcgtgatctcagctcactgcaatttccacctcccaggttcaagcgattctcctgtctcagcctcccgagtagctgggattacagacgcctgccaccacacccaaccaattttttgtatttttggtagagacagggtttcaccatattggccaggctgggggggagggaaaaaaaagagggaaagggggagaatatccaatttcttttatttttaaattttttattttagagacagggttttgctctgttgcccaggctggaatgcagtggtgtgatcacagatcactgcagcttccaacacttgggctcaagcaatcctcctgcctcaggcttcccagtagctaggatgacaggtgcacacaaccacacccagctaatttttttatttttggtagagattaggccttgctatgttgtccaggatgatctgaatctcctagcctcaaaccatcctcccacctcggcctcccaagcactaggattacatgtgtgagtcaccaaaatgagtacagggcttccttttggggtcatgaaaatattctggcagtagatagatatggttgcactgcactgtgaatgtaccaaatgccactgaatcattcacttcacaatggttaattttatgttatatgaatttcactttgataaaaacagatgtggccgggcacaatggctcatgcctgtaatcccagcacttgagaggccaaggccagtcgatcacctgaggtcaggagttccagaccagcctaaccaatatggtgaaaccccatctcgaatctctactaaaaatacaaaaattagccaggcatggtagcatgcacctgttgtcccagctacaggaggctgagacagaagaattgcttgaacctgggaggtggaggttgcagtgagccaagatcacaccactgcactccagcactccaggttggatgaccgagcacgactccatctcaaaaaaaaaaaaaaaaaaaaaaaaaaaaaaaaaaaaaaagaggaagccaggcactgtggctaaattctatcatcccagccctttgggaggccaaggcaggtggatgacttgaggctaggagcttgagaccagcctgggcaacataatgagaccccatctcacaaacaaaaaagatttcttggccaggaatggtggctgacgcctgtaaccccagcactttgagagtctgaggcaggtggatcacaaggtcaggagttcaagaccagcctagcaaacatagtgaaaaccccatctctactaaagatacaaaaaattagctgggcgtggtggcacgtgcctgtaatgccagctactcgggaggctaaggcaggagaatcactctaacccaggaggcagaagttgcagtgagctgagatcacagcaccactgcactccagcctaggcaacagagcgagactctgtctcaaaaacaaaaaacaagaacaaaaacaaacaacagttctagagatgggtggtggtgatgagtgcacaacattgtaaaaatactgaatacctttgaagcccaccttaaaattgttaaagtggtcaattttatgttatttttaggtataatacttacgtactttttgtatttttttctattatgtattgatatgtatatttaacagtagaaaaaaaatgatggtcactcgatcggaaacagaaaaggttaaagcaaaagtaaaatgcatgaaaaccagggagaactgccagataagcacatggtcagtgaccctggattagcccgaggctgactgggtgttggacatggggaacgaccaccacctaggggcaacttgccatctgccgctatgttctttctgggacttggaaaaacatgcattactaggaacttcccctactgttattccctgtttcccccgccaccccgcccgagacagagtcttactctgtctcctaagccggagtgcaatgggcgatctcggctcactgcaacacccgcttcccgggtccaagcgatcctcctgtctcagcctcctgagaagctgggattataggcacaggccaccatgcctggctaatgtttgtatttttagtaaagacgggatttcgccacgttggtcaggctggtctcgagctcctgacctcaagtgatccgacagccttggcctcccaaagtgctgggattacagacgtcagccaccgcacccggcctgttatttcctcttaatactgacatcatcctcctgtttaccaatctttgtcacagaccaggtggcatctctgagaaaacagaaatcagcaggagagaccttccagagccactgccctccatcaacctgcagacctgcatcaggacccagacgcagtggctcttcctcttgccctgtgagaatcaatttgccctggatgcagcaaaaccacgcccccttctccaccaactcctccaccccttcatgggcctagacaagcacctacctcaacaacctccccgcacccctggagcattcctatcagcacacaaataggttgatgcatttttccctcctttgtttttattattaaggtgaaactcacacggcataaaattaacctttgttttttttcctttttttttttttgagactgagtctcgctgtattgcccaggctggagtgcagtggcgcgatctcggctcactgcaacctctgcctcccaggttcaagcgattctcctgcctcagcctctcaagtagctgggaccacaggctcgtgccacgacacctggccaattattgtatttttagtagagacagggttttgctatgttggccaggctggtctcaaactcctgacctcaagtgatccatctgcttcagcttcccaaagtgctgggattacaggtatgagccaccatgcccagacccttctttttttgagagagagagagagacacagacagacagagtctttgtcacccaggctggagtgtagtgactagatctcagcttaccacaacctccaccgcccgcctcagcctcctgagtagctgggactacaggcacacgccaccataccctgctaatttttgtattttttgtacagaaagggtctttctatgttgcctaggctggtcttgaactcctggcctcaagggatcctcctgccttgacctctcaaattcattttcttctgagggcttctattccatgcaaaacttctattaagtaaatctgtatcctctcctgttaacctgtttttgtttgttttgttttctgagacagtcttgctctgtcacccgggctagaacacagtggcacaatctcagctcactgcgacctccgcctccagggttcaagcaattctcctgcctcagcctcccgagtagctgggataacaggcaccagccagcacgcccagctaattttttgtatttttagtagagatggggtttcaccatgttggccaggctggtctcaaactcctgacctcgtgatttgtcgacctcgtgatttgcccgcctcggcctcccaaagtgctgggattacaggcgtgagccactgtgccatgcctggccctatttttttttttttggtagggggagatggagtttcctcttgttgcccaggctggagtacagtggtacaatcttggctcaccacaacctccgcttcctgggttcaagcaatttcctgcctcagcctcccaagtagctgagattacaggtgcccaccatgacacctggctaatttttgtatttttagtagagacagggtttcaccatgttggtcaggctggtctcgaactcccgacctcaggtgatccagctgccttggcctccaaaagtgctggaattacaggcgtgagccaccacgccctgcctgttaacccattttatgtcaacttaataattctcaggcctagagggatcctaagagaacagaggtgaatttttgctgccggacctgctgctatgaactttaatctatgagtttttttttttttctcgagttagtatcttgctctgctgcccaggttggagtgcagtggcaagatcagggctcactgcagcctcaaccttctggcctcaagcattccacctagttcagcctcctgagtagctgggactacaggcaggcaccaccacacccaaataatttttgtatttcttgtagagatgaggtctcactatgttcccaggctggtctcaaattttcgggctgaagtcatccacccaccttggcgtctcaaagtgctgggattacaggcgtgaaccatcacgcccaaccctttttcctttttaagatacagcagggtctcactctgttgccctggctggagcacagtggtacaataatagctcactccagccttgacctccgggactcaagcaatcctcccatctcagcctcccaactagctaggattaaacatgtgagccaccatgccccgcttccatctctttttcattttgttttgttttttgtacagaatattgctctgttgcccaggttggagtgcagtggcatgatctctgctcactgcaaccttctcccaggttcaagcgattctcctgcctcagccacccgtgtagctgggattacaggcacccgccaccacacccggctaaatttttcatttttacaagagaccgggtttcaccatgttggccagggtggtcttgaactcctgacctcaagggatctgcccgcttcaacctcccaaagtgttgggattacaggcgtgagccaccgcacccaacttttcatctgttttctgattcttccttagctccaaaacatctaaggtttggctgcattcactcctctccagcccacagacgcccaactgggccaattcccaaattcatcattctagcccaaaccctagggtccagtgccttctcagcctctgccacaaggggtcctcgcaggccgctccagtgttgcaggtcccaatctggactcctaggggtttcccacccaagccttgtccgagcgtcctctccctctcagttagcaccatcttcccaggctctgctctgacagttctgaggcatccacgcctcctcccacctgcatccaatgtgtctgccaatcctacagcccccatcgccttttccttcaaaacagacctagaagccagttatcactgaccacctgcacttgccagctaggtccagccccttcctgacttctggggatcagtgcagttgtcccctccctggtctccctgcaggttctgttctccccactgcaaccagaaacaccttctctttttttttttttttttttttttgagacagagttttgctcttgttgcccaggctggagtgcaatggtgcaatcttggctcactgcaacctccgcctcccgggttcaagcgattctcctgcctcagcctccctagtaactgggattacaggtgtctgccaccacgcccggctaattttttgtatttttagtaaagacggggtttcactatgttggtcaggctggtctcgaactcctgacctcaggtgacccacccacctcagcctcccaaagtgctggaattacaggcgtgaaccaccacgcccagctctttcgttttcttttgagacagagtctcgctctgtcgccctggctggagtacaatggcatgacctcggctcactgcagcctcttgcctcccaggttcaagcgattctcctgcctcagcctcctgagtagctggaattacaggcatgcaccaccatgcctggctagttttgtacttttagtagaccgggttcgaccatgttggccaggctggtctcgacctctcaaagtgctgggattacaggagtgaatctccgcaccagcttttttttttttttttttttttttttgagacaggaacttgctgtcacccaggctggagtgcattggcggatttcggctcactgcagcctctgcctcccaggttcaagcaattcttctgcctcagcctcctgagtagctaggattacaggcatgcactacaccacatccagctaattttttttttttttttttttaaagacagtttccctcttgttacccaggctggagtacaatgacaagatctcggctcactgcaacctctgcctcctgggttcaagcagttctctagcatcagtctcccaagtagctgggattacaggcgcctgccaccacacccagctaatttttgtatttttaggagagacagggtttcaccatgttggccaggatggtctagaactcctgacctcaggtgatctgcccacctcagcctcccaaagtgctgggactacaggcatgaaccagtgcacccagctgctaatttattttagtagagatggggttttgccatgttgtccaggctggtctcgaactccagtcctcaggcgatccacctgccttgatctcccaaagtcctgagattacaaatgtgagccaccgggctcagccctattttttcagggctattttgttcatggttagaaccaggaacagcactgatacatagtagcattcaacagatatattttattgttgttttctagagacaggatcttgctccattgcccaggctggagtgcaatgggtgatcatagctcactgtagcctccatctcccaggctcaagcaatcctcccacctcagcctcctaagtagctgcaactacagaaacttcaggtatgtgccaccatgcccagctattttttttgtttgttttttagtataaatgagatctcactatattgcccaggctgatctccaacacctgggttcaaacagtcctcatgcctcagcctcccagagtgcttggataacaagtgtgagccgctgcacctgaccatcaacaagtatcttttttaaccagcttttaccagtcggggtctggccatgttgaccaatctgtatgaaacatttttttgttttgttttaaattagctgggcacagtggcgcagacctgtagtcccagctaatcaggaggctgaggcgggaagatctcttaagcctgggaggttgaggctacagtgagctataattctataactgcaccaccgtactccagcttgggagccaaagcaagaccctgtctctaaggaagaaaaaaatgaaaaaaagagtttctgagctatcatactagcttcagtttgctagggtggccataacaaaataccacagcttgggtaggttaaaaacagaaacttacatttctggaggctgacgtccaagattaagatgtcatcagggttggtttctgcttttcatttttgaaacggagtcttgctctgctacctaggctggagtgcagtggcaccatcttggttgcactgcaacctccacctcccagattcaagcaattctcgtgcctcagcttccagagtagccccaggttcaagcaattctcgtccctcagcttctcgagtagctgggattacaggcgcccaccaccacgcccggctaatttttctatttttagtagagatggggttttgccgtatttccgggatggtctctaaatcctgacctcaaatgatcacgcctgggattacatgcgtgagccaccgcacccggcccagagctggtttctactgagcccccttgctttgtcttacagagccgcggccgcctcctgtgtgccctcacatgctctcttctctgcatgcacccttcgtatttcttagtgtccatatttcttcttcttgtagggacaccaggcagattggatgaggacccgatgtagcagtgtatccagaattggtggggtcttggtctcactgacttcaagaatgaagccacagaccctcgcggtgaatgttacagttcttaaaggcagcgtgtccacagtttgttccttctgatgttcggatgtgttcgtagtttcctccttctggtgggttcgtggtctttccggctcaggagtgtagctacagaccttttgcagtgagtgttacagctcataaaggcagtgtggacccaaacagcgagcagcagtaagacttattgcaaagagaaaaagaacaaagcaaccacagcatgaaagacaacccaagttgccactgctagctggggcaacctgcttttattcccttatctggccccacccacatcctgctgattggtccattttacagagagctgaccggtctgttttacagagagctgattggcccattttgacagggtgctgattggtgtgtttacaatccccgagctagacacaaaagttctccaagtccccacagagcactgattggtgcatttacaaaccttgagctagacacagggtgctgactggtgtatttacaaaccttgagctagacacagagtgctgattggtgtatttacaatcccttagccagacataaaggttctccaagtccccaccagattagctagatacagagtgctgattggtgcaattacaaaccctgagctagacacagggtgctgattgatgcatttacaatccctcagctagacataaaggctctccaagtccccactagactcaggagcccagctggcttcaggcagtggaacccgcagggggtcagaggtagagctgcccaccagtcccttgccacacgcctggactcctcagccctcttggcttgggcagtcgatgggaccaggcgtcgtggagcagtgggtggcgctcatgagggaggctcgggcggagcaggagcccagggcagggggaagcctcaggcatggggggctgcaggtcctgagccctgcccagccgggaggcagctgaagccccgcgagaattcgagtgcagcgctggcgggccggcactgctgggggacccggcacaccctccacagctgctggcccgggtgctaagcccctcaactgcctggggccggtggcaccggctgtccgctctgagtgcgggggcccacgcccacccggaactcgcgctgtcccacgagccccttgcgcacagcccgggttcccgcccgcgcctctccctccacacctttagcaagcagaaggagctggctccagcctcggccagcccagagagggactcccacagtgcggtggtgggctgaagagctcctcaagcgcggccagagtggacgcggaggcccaggaggcaccgagagcaagcgagggctgccagcacgctgtcacctctcagcagctgctttttttttttttttttttttttttttgagacagggccttgctttgtctcccaggctggagtgtagtggcgctaacagctcagtgcagcctcctggaatcaagcaatcttcccacctcagcctcctgagtagctgggaccacgggtgcacaccaccaagtcctgctaattaaaaaaattttttttcttttcttctttttgagacggagtttccctcttgttgcccaggctggagtgcaatggtacaatctcggctcactgcaacctccgcctctcagattcaagcaagtctcctgcctcagcctcccaagtagctgggattacaggcatgtgtcaccatgcccacctaattttgtatttttagtagagacgggtttcactatgttggtcaagctggtcttgaactcccgacctcaggtgatccacctgcctcagcctcccaaagtgctgggattacaggcgtgagccaccacacttaggctttttttttttttttttgaaacagactctcactcttttgcccaggctggagtgcagtggtgggatctttggctcactacaacctctgcctcctgttctcaagtatttctcgtgcctcagcctcctgagtagctgggattcaagtgtgcaccaccacaccgagctaattttttgtatttttagtagaggcaggctctccctatgttgcccaggctggtttcaaactgctggccttgtgcaatccacccacctcagcctcctgaagttctgggatgacaagtgtgagccaccacacctggccttaatcacccctttaaagaccctgtatccggcctggcatggtggctcacgcctgtaatcccagcactttgggaggccaaggtgggtggatcacctgaggtcaagagttcgagactagcctggccaacatagtgaaactctgtctctactaaaaatacaaaaattagctgggcgtggtggtgagcgcctgtaatcccagctacttgggaggctgaggcaggaaaatgacttgaacccgggaggcggaggttgcagtgagccgagatcgcgccactgtactccagcctggtggcagagcaagactctgtctcaaaaaaaaaaaaaaagaaattaaccgctgctcacagctgtgctagcttacaggaacaaaggccaagtgccaataaccacaaatgagccacaagatgagagctgacctcagcagtgctccataggcctgattcctcactccactggcataataaaatctccacagccagggtgcactggctcccagctgtcatccaagcactttgggagggtgagaaaggcggctggtctcaaactcctgacttcaagtgatcccccacacctcagcctcccaaagtgctgagattacaggcgtaagccaccacacccggactataacatccattcttttagggagccccagaacctgtgaaattaatctctgctctggccgggcatggtggctcacacctgtaatcccagcactttgggaggctgaggcgggtggatcacgaggtcaggacatcgagaccagcctggccaacatggtgaaacctggtgtctactaaagatacaaaaaagtagccaggcatggtggtgtgtgcctgtaatcctagctatttaggaggctgaggcaggagaaatgcttgaacctgggaggcagaggttgcagtgagccgagatcacaccattgcactccagcctgggcaacagggcgagactctgtctcaaaaaaaaagaaattaacccctgctcacagctgtgctagtttacaggcatgaaggccggatgccattaaccacaactgagccacaagatgagagctgacctcagcagtgctccatctgcctgaatcctcactccatgggcagagtaaaatctccacagccagggcacaatggctccaagctgtcatcccagcattttgggagtgtgaggagggaggattgcttaagtcagagagttcaagaccaccctgggcaacatggtaagaccctctcttggcctgtaatcccagcacttcaggaggccaaggtgggcagatcacgaggtcaggagtttgagaccaccctggccaacatggtgaaaccctgtctctactaaaaatacaaaaaaaaaaaaaattagccgggtgtggtggcacgcgcctgtactactcaggaggctgaggcaggagaattgcttgaacccgagagtcagaagttgcagtgagctgagattgtgccactgcactccagcctgagcgacacagcgagactcagtctcagaaaaaaaaaaaaaaagaccctctctctacaaaaaataatgtaaaaattagccgggcgtggtgatgcatgcctgtagtcccacctacttgggaagctgaggcaggaggattgcttgagctcagaaggtcgaggctgcagtgagctacgatcgcaccactgtacttcagcctgagcaacagagtgaggtgctgtttcaaaaaaaaaaaaaaaaagctgggtgcggtgggtcacacctataatcccagctactcaggaggctaaggcaggagaattgcttgaacctgggaggcggaggtggcagtgagctgagatcgccccactgcactccagcctgggtgactgatcgagactctgtctcaaaaacagaaaaaccaaaaaaaaaaagtcttcagtggggagaggtgcactttgctaagcacatataatgccaggtacaaaagaaaagaaaggctgaacacttcagtgccccctagaaagccccacctctttccaggaatccccacccccagtctgcatctacatgccctaggaaactttaaaactcccctcatcacacctgcagggagtaggcactttgagcaggagttcctccctttctccattcattgattgacgaataaagtttctatcttgctttactgaacctggtcttgttctgttggtgcaaatggcaacccgcagagaaaggactcattagtctcaaacaatccccttaagagtgggtaacagcggacaccatggctcacacctgtgatcccagtgctttgggaggctagggtgggaggatcacttgagctgaggagttaagagaccagcctgggcaacgtagaaagacctcatctctaaaaaaaaaaaaaaaaaaaaaaaaaggcagaggggaggggggcgggcgtggtgtttcacgcctgtaacccctgcactttgggaggccaaggcaggcaaatcacctgaggtcgggagtttgagaccagcctgaccaacatggagaagccccatctctactaaaaatacaaaaaattagccaggcatgatggcacatgcctataatcccagctactcgggaggctgaggcaggagaatcacttgaacccaggaggcaaagtttgccgagatggagccattgcactccagcctgggcaacaagagggaaactccaccaaaaaaaaaaaaaaaaaaaaaaaaaaaaaaaaaaaaaggcgagggggaggagggagactttaaaaaaagaaaaataaaaaaagttttttttggccaggcactgtggctcacgcctgtaatcccagtactttggaaggccgaggtgagcggattgcctgaggtcaggagttcgagaccagtctggccaacatggtgaaaccccgtgtctactacaaatagaaaacaaattcgcctgatgtgttagtgcaggcctgtagtcccaggtactcaggaggctgagacgggagaatcgcttgaacccgggaggcagaggttgcagtgagccgagattgcaccactgcactccagccaggtagacagagcaaggctccgtctcaaaaataaataaataaataaataaataaataaataatgtttttgagatagtctcaaaagggtgttcaggcccttatgtgttccccccactcacacacacacacacacacacacacacacacacacacacacacacaggatctgggctgacctggactccactgaatccacagaatacagcatcggcaacattgacccagcagtctctctgctttgtgtgttggggaaccccaagtcaccgtggcaggagtgtggccaccttgctcaggagtccacgtggagaggccacatggagaggtcagctatcccagacatgacagaccttctggatgggacatccagccagcctggcccccagatgatggcagccactgtcacatggaacaaatgaacccccagtgagcctggtcagcccagagccaggagagaggatgcgacaacaggtgtttggagccagtgggcatggggcggtttgctccactgagaacaagaatgcatgacagtcaggacggtccagagcctagaggtccacttaggtggcatgtggcacccacaccagcctcacagccgggcacacatatccctgacataccctgttgtccgccgaggctgactcgtgacagagaaaacgttagagaaaaaacctggctggatgcagtggctcacacctgtaatcccaacgctgtggggggccgaggtgggagaattccttgagatcaggtgttggaggccagcctgggcaacatagaccaaccctgactttacaaaaataaaaaattagctgggtgtgatacatgtgactgtaatcccaaaactcgggagactgaggcaggaggatttttcttttttttgagatggagtcttgctcttgtcacccaggctggagtgcaatggcaggatcttggctctctgcaacctctgcctcccaggttcaagcaattctcttgcctcagcctcccaagtagctgggattacaggcgcctgccaccacacccggctaatatttctatttttagtagagatgtggtttcaccatgttggccaggctggtctcgaactcctcacctcaggtgatccgcccaccttggcctcccaaagtgctgggattacaggcatgagccaccgtgcccagcccaggcagatctcttgatcccagttcaaggctgcagtgagctgtgatcacactactgcactccaacctgggcaacaggtccatctgagtccatctctaacggtcccagggaggtcactcccctgcaaggaggctactgtggcccccaacatcccattcagagattcagaagctgaggataagggaggaactttgccctgtcacccagaagtcagggtgtgaattaactttaccggtcaccaacctttttggcagcagggactggtttcatggaagacaatttttccacggaccaggggtggggatggtttcaggatgattcaagtacattacttgtttttgtttgttttttgagacagtcttgctgtgacacgcaggctggaatgcagtggcctgatcacggctcactgcagcctggacctcccaggctcaagcaatcctcctacttcagcctcccaagtagctgagactacaagtgcacaccaccacccacagctagttaaaaaaaaatgtataggccaggcacagtggttcacgcctgtaatcccagcactttaggaggccgaggcgggcggatcacctgaggtcgggagttcaagaccagcctgaccaacatggagaaaccccttatctactaaaaatacaaaattagccaggtggggtggcacatgcctgtaatcccagcaacaagaacgaaactctgtctcaaaaaaaaaaaaaaaaaaaaaaatttgcagagatccctatgatgcccaggataaataataaaaccttttttttcttttttgagacagagtctcactctgtcacccaggctgcagtacaatggcgtgatctcagctcactgcaatttccacctcccaggttcaagggattctcctgtctcagcctcccgagtagctgggattacagacgcctgccaccacacccaaccaattttttgtatttttggtagagacagggtttcaccatattggccaggctggtctcgaactcctgacctcaggtgatccgcccacctctcggcctcccaaagtgctgggattacaggtgtgagccactgtgcccggccaaaacgcagtctctaaaaacataattaaaaaataattaaaacagggtgagtctgagaccatcccaggaaacctggcttccactgcactgaggaggaagccacagtgggtgggggtccccagacctgggaatgggaaggcactgcccaagctctgctcttcttccaagaatcctgatgttaacgcagactccccaccccagccctgctgcccctgctcccaaaaagcaagcagcacagtagctgcacacagggctgggtgtccatgtcccaccttctatgggctgggctctcatggaggaggggctgcagcagcgaccccaggctgcccaggccaagggagacagagacccagaggcaggcggaggatgtgaagcaactttaattgccaccctcagacggggcagcaggagtgtcttaagcacagggccgttctaccccctgggagctgcctggggccagcccctcagttctggctgtggcaggttccccatcctagctccccggatctccatagggagtgtccagggaccctcaatctccagggccacttctgcaggagctcgggttcgaggttccacgtggccagaagagctcaggtctctgagggctggtgtgcccgggtacccatccgcatcactgctctcctcctgtccggctacgcccagggctgagtgacggtggtggcaagtgcttgtcctcagggcagcgaggtcttctgttctgacagcagcagggactccttcatggccaccagtaaccccagtgggcggaggcgctcctgggctcggagccaggacaaaaggaggagggtggcggtgaccaggcttgcactgagcaccgctgtggggaacagatggacagaggagtaaggagggggaaggcaagagcccccacacccaccaagctccatacacatggggatgggagttctgcagctcatccctccccacccacctcccctgaatccccggagctctaagcccccagcatgggagggtaagtccctcttaccagcagctgcaataaccccataggcagttgggcttccagactggtctccggcagaggaggatgtggcattcccgacagaggggacactctccagggtcacagggggccccatggttgtggcattcctgagagaggtgacactctccagggtcacagggggccccatggttgtggcatccccttccgggaggatctcattggttcctgcaataagcccaggcgttcagtagttgaggagagagcactgaaggcgtgagggggccagatgcccaggggagcccttggggtttatcctcaaccaaccaggctgggtgaagctgactgcccgtaattatgtctttttttttttttttttttggagagggagtctggctctgccacccaggctggagtgcagtggcgcaatattggctcagtgaaacctctgcctcctgagttcaaacaattatcctgtcttagcctcccgagtagctgggattacaggtgcacgccaccacgcctagctaacttttgtatttttagtagagacaggatttcgccatgttggccagactggtctcgaacacctcacctcaggtgatctgcctgcctcggcctcccaaagtgctaggattacaggcgttagccaccgtgcccggccttttttaaatttttttgagacagagttttgctgtcacccagactggtgtgcagtggcccaatctcagctcactgcaacctctgcctcccaggttcaagcggttctcctgactcagcctcctgagtagctcggattacaggtgtgtgccaccatgcccagcaaatttttttgtacttttagtagagacggggtttcgcagtgtttgccaggcaggtctcgaaatcctgacctcagatgatccgcccacctcagcctcccaaagtgctgggattacaggcgtgagccaccgggcccggcccctaatgatgtcttgattcccccacagggatgcaggcacgggcaaaggcatgtgtccacgcccccagcctggccacgccccagcaggcagtgggtgtccccatctacccacgagtccaccccagccccgcaggtgcataccacagccgagctcgtcgctggagtcgggacagtctgggtggccgtcgcagcgccacgtgagtggaatgcagtcatcgctcagcgtgcaacggagctcgcctgctaggcaggccaggcggctgcagttgcgcagtttcttgtcagttcccccagagcagtcactgacgccggtgcaggggcaggggaggccagggggcggtgggcattgccctttctgggtacatggctcaatccctggggcacagggttggtcaggtcccaaatgcccacccaagaaggcccaggtactccctgaaaccccatcccctgcaagccccaccctctaagaacagctgagcccaaaaaaatgctcccttcctaaggctccgccccctgcaactgttaactccactttctaaggacaggcctccctgcaagctcttcccctgagaccccactagctctaccttcctacaagcccactttattctatttgtttgtttgtttctttctttattttttcttttgagacggggtctccctttgctgcccaggctgcagtgcagtggcgcaatctcgactcactgaaacctctgcctcccagggtcaagtgattctcctgccttagcctcctgactagctgggattacaggggcctgccgccacatccagctaacttttgtatttttagtagagatggggtttcactgtgttggccaggctggtctcgaacgcctgacctcaagtgatccgcctgccttggcctcccaaagtgctgggattacatgtgtgagccaccgtacctggctccctccctctctctttccttcctttctttcctttctttcatttttcttttttttttctttttctttttttttcctgagacagtcttactctgttgcccaggctggagtgcactggcacaatcctagctcactgcagcggcaacctcccaggatcaagtgatcgatcctcccaccctagcctcccaaagtgctgggattgcaggcgtgagccactgcgcccagcccaagcccatcttagaccccgcttcttatgacccacagacccaagtcgcacccatccctgcggccctgcctttcccacaagctccacctccgcgtgcctggcccctgacaaaccaccctcaggccccgccccctgtaagccccgccaaggggcgtggccactcactgcactcctcctcatcgctgccatcgctgcagtccaagtccctgtcgcagcgccaggtgaggggcacgcataagccactggtgcggcactggaacttggtgggtgggcacgagcctgagctggggcctgcgagatggatgcaaatgaagcctgggaagctggaggctggacctttctccaagagcacagtagtcactggctgtgatccgcaggagacaggcgaagtcccgggatataggaaccacactggcggctgcttgttactgagcccctagtacgagtggggttcagagtgtagcagttcctgggctcaagagccccactgggcaggtgctactgcactccccaggttacagagaaaggaaccaagaggaggccatacagctggtggcagaggctgggtgcagtggctcacgcctgtaatctcagcactttggcaggccgaggcaggtggatcacttgaggtcacgagttcgagaccagcctggcctacatggaaaccccgtctctgttaaaaatacaaaaattagccgggcgtggtagtgcacgcctgtaatgccagctactcgggaggctgaagcatgagaatcgcttaaacctgggagatggaggttgcaatgaaccgaaatcatactgctgcactccagcctgggcgacagaacgagactccgtcaccacaaaaaagaaaaaaaaaagagctggtagcggagttgggcttcgaactcaggtctcgctgatcccagagtcttcaccaggctcctcatagcgagatgatctgccagggagacctccaaactcagtggttaaagagactgagggacgggccatttttccacatgccctgggtcaggctcccgggctcaggtcagcagggagggtctatctcctctgcgtagcaaaagggaaactgaggcagtgggtgggaaactgaggcactgggtagaaaatctgctcagtcaccaagtcctgttgccccgcctcctgaattcctcccagacctatcactctccccatcctaaatgtgtcagctcctcaccagagccccaggccccaggccccaaggtccattaggacaccagagacttgcctttccctctctcctccctacaccctgtgttttcccctcaattttcagatctcagctgatttcctgggagggttctcatgtccctcttggagacctaggaagcactgcctcccatgtctaacaactgtccttaaagccctggtcatgcctgtccacccacagactggacattctgtggaggtcagggctgtgacctggccgcctaaacccagggcagtgcctgattataagtggacacaggtcacataagggtccaagctgggtccagagaagatcccggctgtcctagattctgagcagggaagctcagctgcttgccgacctggaggggcacggaggggcccgcaacctgggccaagggacagaggaagggagtggcctttacggcttcctcctgggtgcggccaggggaggtggcaaatccgccaccctggcttagcttcactctgccaaggcctttaacctcttccacctttacccaccagccatgagcctccaaccccccactccccactgccagcccctcctcggccttcaggcctaattgcacctacttgccacagggtccctgagctctatggatcccagaagagctgtggacaaaccggtgcctgcttccttccccgcccccgggagatctggcagcctccaggtgtggctctccacccaggcgcagacttccacagccctgacacctctgacctcccttcgctggactgcgggagtgtgtatccctctgcaaagtggacagtagagcacagcagtccccgcctcatagggtgtaagcctgacaggagttacagtgaccagtgactttctctcctggcctcagtttcctcacctgtaaacggggtatgctgggaatccctacctcaacatcctgagaaaaaagagactgtgtatagagttttgtcctgtaatcccagcactttgggaggctgaggcggacagaacacttgaggtcaggagttcgagaccagtctggccaacatggtgaaaccccatctctactaaaaatacaaaaattagccgggcatggtgacggtgcctgtagtcccaagctactcgggaggctgaggcatgagaattgcttaaacccgggaggcggagggtgcagtgagccaacattgcactgcactccagccagggcgacagagggagactcaaaaaaaaaaaaacaaaaacttttgtacttggttaacgtgaacgctgcctccttaaaaaaaaacaaacaaaaaaaaacccaggaacatttaacgtgaatgtcagggactttgggatgagtccagggacctagaagtgcggaatgcacaaaggagctgggaaagtgtgtgagcctgagcccagggctgcaagttgggagtgcctgagtgcacagggaggccactccaaccctccagctgcctctaggggtatcagagagggagcccgtccccactggccaccaatacctcttaggccagggcgaacacgtccacgggggtatattcaacttgtgaccccagtctctgcgagagcctgcagtagcatgggggggagagacctcgcgttctctaaggatggaggacaaaggaggagagactgggagggcagggacggttgcggaacggtcacaaggcctgggcgcgagggtttggaaggcaaaggtgcgagaggcaccaggtgacccgtcctgcgtgattagcggtcggacaatctgagcctgctaagagctttcctgaccacgctggtatgaagggcggcttggaggtgacaatgggggacgacagggcacagcaggtgtggagacggtgtgcagggccggagcaaaaccgttaaaggcaggtggagacaccctcctcccctcccccagcatggggtcttcctagcaccagtgcgcgccttcccacaagcgatgaagtccaagtccacgtgctgggggagtgtcatgaactgacgtgcggtgcagccagtgactaggcgttgtcggtgcgcggcggcggggcgaagcctcgcgaggggtgggagcccgcgctgcggggcgtcactcacctgcggcctgggcagaggtcggggtggaaagcgggctcgcggcggcctccaggcctagtccgaggccgagcagcagcagcagcgccaggcccagagcccctgttcgccacgctccaacctgcgccatccaaccgccgctcatgctgtccccacagcggcgccggccacgcgctgtccagaccgctctcttatccctgcgcacgcgcacgcgcggggttggggcggggcccaagcccctgagttctgcggcgcccgcggctacgcgtaccgtaaatgtcagaatagcagggaaaagagaattagaggcccgtccccactttccccagtgaccagatcagttgaaaggtatggagcccgcttgaagttagaaacttctggggatgggaaggaatttgttggtgttcatttgcattatttcccgttccaaatgaggactgctgcaaatgttactgcctcgtgatcttctttaatatggcagccacgcccctcaggcactccgcatttcctccctcatcccactgcttttgtggcgccgacaggtaatttattttatttacttattctggtttgttgtccgagtccccatagaatgctagctactggagggcagggatcttctgttgctcactgctttattctcaggatctgacacatagtgcttgactcatagtaggctcttagtaaacatttggtgagtaaatgaataaatgaaacgtccattctcggagtcgggttgcttgggggggaaaaaggaaaggaaatcaattaattaattaaatttaataataaaggccgggcgcggtgggtcacgtgtgtgatcccagcattttgggaagcagaggcgggcagatcgcttgagcccaggagttcgagatcagcctgggcaacacagcaagtccccgcccgcctcaagaaaaaagaaaattagctgggcatggtggctctaatttgtagtcccagctactcaggaggctgaggtgggagaatcacttggggctgcactccagcgtgggtgacagtgagaccccatttgttagaaaagttggccggcgcgctggctcacgcctgttaaccccagcactttgggaggccgaggcaggcggatcacgaggtcaggagttctaaaccagcctggccaacatagtaaaactcccgtctctaccaaaaatacaaaaattagccgggtgtggtaacatgctcctgtagtcccagctactagggaggctgagatgggagaatcgcttgaacccgggaggcggaggttgcagtgcgccgagaccacatcattgaactccagcctgggtgacagagtgagactctgtctcaaaaaaaaaaaaaagttgtggtcataaaacttggttcagatgccgtcagcggcatgccttgcctagggtcttgccctccttgtggcctctgcacaccctgcctagtctttccttccctcctgacctttctgaatctgattcatccttttgccccaagcagaatcccaccttctccaggaaggtgttagcctttgtaggacccactctgggacactggtacctgctgcctgtagccgtggcctttccccttccagagggcagggcggtctcagcaccctcttggtccacagctgatcttttttagctgctgaagggtctggggctgtgccctggggaagccatgacactcccctgcgtagggtcactgggtggctcctgcagccagacttggacaccctccctttgcagatttctgtctcctccccaggaaccagctgccttccttctggggcgaattcattcttatcccacagccccagcataatgggatctggctcagggaggcctttcctgatctgccctaggtttgccttccctgtgagcagcccttactgtcctctgccttccccgttgagctgcagggtgaccatggtcaagcaggagcctcagtgggaaggtgctgaggaaggttcatgtgagaagtggctgtgggagccctcaagagatggaagttaggccaggcgcggtggctcacgcctgtaatcccaacacttcgggaggcagaggtgggcggatcacttgaggtcaggagtttgagaccagcctggccaacatggcgaaaccccgtctctactaaaaatacaaaaattagctgggcttgtggcaggcgcctgtaatcccagctactcgggaggctgaggcaagagaatcacttgaacccaggaggcagaggttatagtgagccgtgatcgcgccattgtactctagcctgggcaacaagagcgaaactctgtctcaaaaaaaaaaaagaagtgagaagtctgtggctggcctactgagtgtccgcacatacaccccttaccccacctgactggtcttcacaatcaatgctccccaacagccagcggtcctgggagtccaacctcccagaaggatcacccactcccaccactctcaaggtcagagcctggcctttgggggaaagggcagtgctgtctccagggcctctgcacccagggacagtgtctgtcccacccctggagtgccaacagagttgggagactcagcactgacttcaccccaaaatccaagtaagctgggtattgcttaaaatcaggggccaggcgtggtggctcacacctgtaatcccaacactttgggaggccaaggcgggcggatcacctgaggtcaggaatttgagaccagcctggccatctctacaaaaaaaaaaaaaaattagcgggtatggtggtgcacacccgtagtcccagctactcgggaggctgaggcagaattgcttgagcccaggaggcagaggttgcagtgacctgagatcgtgccgttgcgttccagcctgggtgacaagcgcgaaaactctggctcctgcagccagatttctatctcctccccaggaaccagctgccttccttctggagctaactcattctcatcccacagccccagcataatggtttctggctcagggaggcctttcctgatctgccctaggtctgccttccctgtaagcagccctcactgtcctttgccttccccgttgagctacagggtgaccaaggtcaagcagaggcctcagtgggaaggtctaaaaaataaaaataaaatcaggccaggtgtggtggctcatgcctgtaatcccagcactttgggaggtcaaggcaggaggatcgcttgaggccaggagttcaagatcagcctgggaaacatggtgagactctgtctctatttttttattttttaaagtaaaactagaagtgatacctgagctctacgtatttgtcataaattaggtcacattctccctggaggaaatccaaggaggcaaagtagtcgggtggccgtgagggtgcagtgtcacaggtaaggctggtccgaggacagctcccacctctttatgggaggagctggagtcaccgccttcttctcagtggcagctacagcagagctggaggagggaaagacttcagtgagggtttccaaagaacagtgtggaaagatctgagggagcccacacctgccccgggacaaacacacccacagggactttctggacctgcaggacagacagcagggtgttccagaatgccaacccctccaacgcagcccctcagaggatcagccaacgccaggtgggagctagcaagcctcctctctcccctgagccctgtatgaaccccctgctgtggcccccaggcccagaacccactgtggagagctgggctcctcccttcccacttttggtctccagcgtacacaaggcccccacccccattcctgctgcccctcaaaacaggatgctggcaaaagggccaagcgatcaggtgacaatggcctccagctattcctgcctcagactgggcaagaactgcatggcaggcgctactgtgtgggcgcagagccaggaagatggggcaccgccctcaggaagactcaggctggtggggctgagaatccatgcgcaaatggcaactgcaaaacgcatctctggcccagagctggccaagagggagcccccaggagaccctgtgccggcaagtccaggacgagcaccctcccctctcaccccacccacctgagcctgtggagctcacacacttcacagcctaagcaagaaaggaagcaggagggtggggtgatggaggaggcgccccaggggtggaggcacaggacctcccaggagcctcaaggaaatggaaaaggcagaagtggcctccctgggaaatgcacacatctctgggggcatggcaaggggctgtgtgggaacaaggtatcttgccacactctggtgctggactccagtgaatcagaaggtgacaacaaggaccactccactgagttccttctttttgagacagactcttgctctgtcacccaggctggtgtgcagtggcacaatctcagttcactgcaacgtccgcctcccaggcttgagtgattctcttgcctcagcctcccaagtaactgggattacaggtgtgcaccatcactcccggctaatttttgtattttctttcttgtttattatttatgagacagggtctcactttgtcacccaggctggagtgcagtggcgcaatctcagctcagtgaagcttcctcgacctcccaggttcaagagatccttctgcctcagcccttcaagtagctgggcctacgggtgcacaccaccacacccggctaatttttgtattttttgtagagatggggtttccccatgctgctcaggctggtcttgaacttctgggctcaagcgatccacccgcctcggcctcccaaagtgctgagattacaggcgagagccacagcgcccctaacttttgtatttcagtagaggcagggtttcgccctgttggccaggctggtgtcgatctcctgacccctagtgatcctctcacctcggcctcccaaagtgctgggattacaggcgtgagctaccatgcccagcctaaaaaatttctaatagagacggggtctcgctgtgttactcaaacaagtctagaactcaagcaatcctcacacctcagcttcccgagtcactgggattacaggcacacaccactgcgcctggcctattcacagagttcttttttttttttttgagacagagtctcactctgtcacccaggctggagtgcagtggcgcgatctcagtgagctgcaagctccgcctcccgggttcacaccactctcctgcctcagcctcccgaatagctgggactacaggcgcccaccaccacacctggctaattttttgtatttttagtacagacagggtttcaacatgttagccacgatggtctcgatctcctgacctggtgatccgccctccccggcctcccaaagtgctgggattacaggcgtgagccaccgcgcccagacctcacagagttttaagtacagagcaggccctgcctgacctcatcacctcccagatctcagcacactgcaagtctagcatccctattttatatgtgaagaaaccaaggctcaagaaggctgagggactgcccacaccgtgagttggctgtagagcccagaccccaacaggagtccaggaaaactggtttgaaatcctgcttctgcttactgctgcctgtgtggcccaggccagtcacttggcttctgtgagcctcgatttcctcttctgcaagaggggtcatcaccatctaactggtggagttattaggaggtaggcaggacactgactctgtgccaggctccaagagtttacaaatattaattatgaggactaaccctcgtaacagctttctgaagtagatgctattagagtccccatttaattaagagaagacacctgaaaccagggaccaaactgctttttgagaggagcccaaggtttatacacttctgtctctgagaagaatacatggctgggcatggtggctcacacctgtaattccagcactttgggaggccgaggccagaggatcacatgaggtcaggagttcaagaccggcctgaccaacatggtgaaaccccatctctactaaaaatacaaaattagcctggcatggtggcatgcgcctgtaatcccagctacttgggaggctgaggcaggagaatcacttgatcctaggaggtggaggttgcagtgagccgaaatcgcgccactgcactccagcctgtgcaataagagtgagactgtctcaaaataaataaataaaataagaattcataattatatcaacagtaatgtctcagtttctcacaggacccttggagggaccccggacttcatctgttttgtaggatgcagagtcctggctgaggcgctaacttctaccctcccctgggttggactaaatgagctcttgctgagcatggtgactctcacttgtagtcccagctactcgggaggccaaggcaggaggatcgcttgagcccaggagtttgagaacggcctgggcaacaaagcaagaccccatctctacgaaacatttaaaaattaacccagcatggaggccgggcatggtggctcacgcctgtaatcccagcactttgggaggccaacgcgggcagatcatgagatcaggagatcaagaccatcctggctaacacggtgaaaccccgtctctactaaaaatacaaaaacttagccaggtgtagtggtgggcacttgtagtcctagccactaggcaggctgaggcaggagaatggcgtgaacccctgggaggcagagcttgcagtgagccgagatcacaccactgcactccagcctggtgtggggataagaaagagaaatcagattgttaatgtgtctgtgtagaaagtagacataagagactccattttaatctgtaatcttacccccaaccctgtgctccctgagacatgtgctatgtcaactcagagttaaatggattaagggcagtgcaggatgtgctttgttaaacagaagctggaaggcagcatgctccttaagagtcgtcaccactccctaatctcaagtacccagggacacaaaacaccacagaaggccacagggttccctgcctaggaaagccaggcattgtccaaggtttctccccatgtgatagcctgagatgtggcctcgtgggaaaggaaagacctgaccgtcccccagcccgacaccggtaaagggtctgtgatgaggaggattagtaaaagaggaaggaatgccctgttgcagttgagacaagaggaaggcatctgtctcctgcccttccctgggcaatggaatgtctcggtgtaaaacccgattgtatattccatctactgagataggggaaaaccgccttaggcctgaaggtgggacatgcgggcagcaatactgctccttaaggcattgagatgtttacgtgtatatgtatctaaagcacagcacttaattctttacattgtttatgatgcagagacttttgttcacgtgtttacctgctgaccttctctccactattatcctatgatcctgccacatccccctctcacacatcacacccaataatgatgaataaatactaagggaactcagaggccgggtggatcctccgtatgctgagcgctggtcccctggtcacccgatttctttctctatactttgtctgtgtctctttcttttccaagtctctcattccacctaacgaggaacacccacaggtgtggaggggcaacccaccccttcagcctgggcgacgcagggagactccatctcaaaacaaaaacaaaaacaaaaacaaaacaggccaggcacggtgggtcacgcctgtaatcctagcactttgggaggccgagtcgggtggatcacaaggtcagttcaagaccagcctggccaagatggtgaaaccccgcctctactgaaaatacaaaaattagctgggtgtagtggtgggcacttgtaaccccagctacttgagaggctgaggcagagaatcgcttgaacccgggaggtggagattgcagtgagccgagatcacaccactgcactccagcctgggtgacagagtgagactccgtctcaaaaaaaaaaaaaaaaaaaaaattgacccagcatggtggcactaatctgtaacaccaattactggggaggccaaggaaggaggggaggatcacttcagcctaggcgttcaaggctgcagtgagtgatgattgcgccattgcacttcatcctgggcaacagagcaagactctgtctctaaaaacgagtaaatgagctctcggacaaaaagctcccagcagcacagttcctgcgcaactgatgcttactaagtaggatcttgacaagcaccctttccacaagttgggagacagagtgggttgcaggagggggcatgggggctgtggtgagcagcgctggagatcctcacctctctgctggcttgcctgacaccagcgccttctgcgacgacatgatgatggaagggggcacagattcccggcggccatcgcgagtgcaatagtaattgttggagagcttgtggctaggacccacagggagcttgggaggaggctgagttctgaggggaaaaaagatgagcactgaagcaaagagacagtcactgtcatggccccgctgtgggcccctgtcacctcagtcacaaaatgtgggatctacagccagccactgggataagccacaggctgggggtgtcccttggtacactggcagggacatatgcctggggaggggtcctggggccagaagcagatggtggaccctgctctggatgtgaagatgccacccccagggaccccacctgtcccaaatgtggagggtacagaggaccctttctgaggctcccaaggcccgggacatgtccccatgccccccaccccacggctgagcttggcagccagcctcacttgactttgtccactctgagtggctttttcccctaaagccaggctctggacgccctgcgtttcctgttatctcaggaagtctctggagaaccctgctaggatcaaggcccattattcaagaacaccttagccttggagcctgtcaagatctctgcatttcctgccaccatgtggccaggcaactcctctctggagcccagagaggggtgaacagagctcggtcttggcttgaactaaaccctgggctggatttacctggaagcctgaggccttaaaagaaatgctcaaaacaaggatgggcagggtggctcatgcctgtaatcccagcactttgggaggccgaggtgggtggatcacttgaggtcaggtgttcgaaaccagcctggccaacactgcaaaccccatctctactaaaatacaaaaattagccaagcatggtggtgggaggcagaggttgcagtgagctgagatcacgccactacactccagcctgggcgacagagcgagactccatctcaaaaaacaaaaaaagctcaaaacaaaagacgggctttccagagagagggaggagagaagacagcaaaaaccgtaaattgatctgtttccacttagccatgtttctaagtcacttttttgtctgggaactgtttcccggaatttaatttttttctgaggcagtgatcatatgcactgcagcctggatgatatatgcaatcatatgatcgcttgaggtgtgatcatagctcactgcagcctcaacctcctgggctcaagcaatgctcccgcctcagcctctcaagtagctggaactacaggcgcacactaccacatctggctaaaaacaatttttctattgtttttgtggagtcgggggtcttgctatgttgcccaggttgatgtcgaattcctggccttaagttatcctctcaccttggcctcccaaagtgctgggattacaggcgtgagccaccactcctggcctttttcttaaaacaagtgttagtcactgtattttttaaaaataagaaacataaagtaaaaaatgtttaatattaaaagcaatatattatgtgaaagactttgcttaaggaggctggatgtggtggctcataccttgggaggccaaggtggaaggattgcttgaggccaggagtgttttttttgtttgtttttttttgagatggagtctcgctctgtcgcccaggctagagtgctgtggtgcgatctcggctcactgcaacctccgcctcccaggttcaagcgattttcctgcatcagcctcccaggtagctgggaatacaggcgtgtgccaccatgctggctaatttttgtatttttagtagagatgggttttcactatgttggccaggctggtctcaaacttctgaccttgtgatccgcctgcctcggcctcccaaagtgctgggattacaggcatgagccaccatgcccagtcagaggccaggagtttaagaccagcttgggcaacatggtaagaccttgtctctatacaaaaatttaaaaattagccaggcacggtaacatgtgcctgtaatcccagctacttggtacgctggaccaggaggatcacttaggcctggaagttcgaggctgcagtgagctatgattgtgccactgcactccagcctgggtcacagaaacccagtcttacaaaaaaaaaaaaaaaaaaaaaaaaaaaaggccaggcgcggtggctcacacctgtaatcccagcactttgggaggccgaggcgggcagatcacgaggtcaagagatcagaccatcctggcaaacatggtgaaaccccgtcactactaaaaatacaaaaattagctgggtgtggtggtgcacgcctgtagccccagctactcgggaggctgaggcaggagaatcacttgaacccgggaggcggagattgcagtgatctcagatccgccactgcactccagcttggcgacagagtgagactctgtctcaaaaaagaaaaaaaaaaaaagaccaataaaacatccagatgaatcactagagggtgccgtcatcctaaaaaagtcaaaactttcacaaagccatttcctcaactggcccacaactaccctgatagaaagccaactaggggggtcgggggttgggggggagagagcatcaggaagaatagctaatggatgctgggcttaatacctaagtgataggttgatctttgatctttgcagcaaactaccatggcacgtttacctttgtaacaaaactgcaaatgtaccccagaacttaacgttaaagttgaaaacaagccgggcgcagtggctcacacctgtaatcccagcactttgggaggccgaggcaggcggattatgaagtcaggagttcgagaccagactggccaacatggtgaaaccccgtttctactaaaaatacaaaaaattagtcaggcgtggtggcacatgcctgtaatcccagctacttgggaggctgaggcaggagaatcgcttgaacccgggagatggagattgcagtgagctgagattgtgccattgcactccagcctgggcaataagagcaaaactccgtctcaaaaaaaaaaaaaaaaaaaagttgaaaacaaagtttgatacttctaatatttggaattagtcacaacatataggcatttacataaatttcattattttaatgctatttttcttcctttcattataatcctcaatgactgccttacctctgcctaccctttgacttcatagattataccattatccctttccctcaatgggttccatccatactggcctccttccactcaggctctgtccagcctgacactcttagcccttcctgttccctctgctcagaatgttttttcttttttatttttttgagacagagtgttgttctgtcacccaggctggagtgcagtggtgcgatctcagctcactgcaatatccacctcctgtgttcaagcgattctcctgcctcaacctcccgagtagctgggactacccgcgcgcgccaccacgcccggctaatttttgtatttctagtagagagggggttttactgtgtttcactgtgttggccaggctggtctcaaactcctgacctcgtgatccgcctgcctcagcctccccaagtgctgggatcacaagcgtgagccaccgcgcccggtcagaatgttttttcaataattattctttgaatgggtccttcccatcattcaggggactcaactgtcaatttccaaagaaagatctttcccaatcatctgactttacgtagccaccctccagcttccacttattttgttttgtcttcaaagcattccagaacaatactacctgctgtgtttgtttccctactatgcttctccctagaatgtggcgtccatgaaagaatgtggataagaactttcctggttcacaaagttaaacccaaggctgaggtcatacatgacgggggcttgtaaatatcaactaatattttaatataaatgagtctgaaatcaggacacttctgggttcaagtccccgctgccactttttagcttctgagtgacttgaggcaaatgatttcgcctctctggacctcttttttcatctgtagcttggggataacactgactaacatggccacgctgagcactgcaaatctagcctgattgccagtcagaatgcacgcccggcctcgctgtttcaggagggctgtcctccggagttcagcaaggttaaaggcaaacctctgcctccacagcctggcaggggactggtggcaggatgtcagccctccgtttcaggggtctaaaggaacacagatttcgtttttggtggagaaaggacagagccagaggctgggcagcgagcggggcctgctcaccgcttggagatctcctggtagcgtagctgcagcttcccctgcaggtcatgctgtgggaagaggagaggagaggtcggcctgcaaggcaccccaggagagaggaaaggagagggcaagggaccagggatggtccggggatgcgcattttaagggaaggcaggggatgaacactcggggaaacggatgtgggtcctgcaggtgaagagcaaagccagagtccgggcccacagatccaaggctaagaaggtcggggactggggaaatcccaggcctgagtggttcccaggccaggagagggtcccgggctgaaggggtgactagctgggggttcccagggagattcggggagagcgaagggtcccggcttaggagggaggtgaggagcaggagcgggtcccggacacacggagcccgaagccccccatggtgcagccctgtccgccccgcgcaccccggacgcccagttccgcagccgctggatgagacgggtggcggacgccatcttccgtccgcgatactgaagggcgcagccggtgacgtctccaccgctggggctgctgggaaagacgcggcgtggtatcgcgagacgggagtgggcggtgctagaacgtcctataaaggctctccccgaagcacgtgactcctctccgccagaccgccgccgcgccgccatcatggacaccagccgtgtgcagcctatcaagctggccagggtgaggtgggggcccgaatttgggggcagggggagggattagaggagccaaacgggccgggtctgaacccagcttctttcctccaggtcaccaaggtcctgggcaggaccggttctcagggacagtgcacgcaggtaatcgggtgggggcatttggccgactgccggcgacctaaaccctgatgtgacctctaccctgccctaacccctgccagccggaatccgggagccgattctcatttcatcacggggttctgatggttccctttaacgatctgtattctggccccgacacgttctctgaattcatatctgcttcccactccgcggtgcctttccgcggcccgcccttacttcttcctccactccggtggggacccgtaggtgcgcgtggaattcatggacgacacgagccgatccatcatccgcaatgtaaaaggccccgtgcgcgagggcgacgtgctcacccttttggagtcagagcgagaagcccggaggttgcgctgagcttggctgctcgctggtgggtgcaaagaggacacccctttgatagacctttggttggtggtagggaggcttcgttaagcccagggtgagagggtttgggaggcagagtctacatacagagactgacaagagggaggcgggagtttgccaattgctgcggggcctgtcaacatctcatgtttgggtctgtttacagggtcttggatgtcgggttcgaccacttggccgatgggaatggtctgtcacagtctgctccttttttttgtccgccacacgtaactgagatgctcctttaaataaagcgtttgtgtttcaagttaactcaggttcttgtctgggttatacgactagggtttctccaggtttcttgagtggctcccaggcggtcaccgatcctccgcactctggaaatcctggccgtgcggtcttgccaaacgaagcttttcctttttgaggcggggggtcgtgtttgtcgattgcaccctctaccccaaacaaaacacaagcgtagtaggaatgttttattagcaaagaagtttcagagagtgggtggatcagggctctatcacttggtccccacctcaccttggtggggccagagtgagccccttcctgccacagtcaccccaactgaaattgcctttctcttcggccagtgttagcctctgagcaggggaccctggacccttctgtgcgccaaaggctgaggtgactgacgaggagatctccccacagctaggtgtagtgagccagacgaggcagcttactgaacctgggggttctctccattgtcaccgcattctccttcaccaggtgtggctgtctgggagccagggggtgactcgctctggagagaggggaaaagaggggggcctgctgcaatctccttgaggcaggaaacgtgggattcagccccagcctcacttagtggaggttcttttaccatggacccaggctgcctggtttgtatccaacctctgccccttctgacctggaagaggcgcttgaccttcctcccacatcccttccagtggggtgagtacaggtgttcctcagtttacaatgggttacattccggtgagtacatcataggttgaaagtattgcaagttgaaatgtgtttaatacacctaatctcccaaacatcacagcttagcatggtccatcttaagcttgttcagaacgccttagcctgtagttggggaaactcgtctaacacgaagcctgttttaataaagtattgaatgtcttatgtaatttattgaatactctgctgaagtgtggtttttactaagcacacattgcttttatgctatcatgaagtcaaaaaattgtaagttgtgccaggcgcgatggctcacagctgttgtaatcccagctacttgggaggctgaggcaggagaatttcttgaacctgggaggtggaggttgcagtgaactgagattgtgccgctgcactccagcctgggtgacagaacgagactcttgtcttcaaatgaaaaaaaaaaattagctgggcatggtagcacgtgcctgtagtcccaactacttgagaggctgaggcagaagaatcgcttgaaccccagaggtggaggttgcagtgagctgcagtcgccccactgcactctagcctcggtgacagaggaagactccatctcaaaaataaataaaaaatggtaagtggagccatggtaaattggggtcaacctgtacaggatgagtgggctgattagataacttggattatgaaagtgctaaaacatcctggcacttggccatcagagtatagtggtgttgggggttaatgtgttctgcaaactcacccagtctccagttctgaagctctggacccccttccccaccctgcctgatgccaaagggctcctttttcctttgataagagcctccctggcagtaggtaacaggagcccaggggcatgcatgaaaggtcttagctaggtctctgtgaccttaggttacttccccccttgaggactcagtctcatgacctggggtagtgtcaacctcactggggttttgctgctttcacatcaaatcccagcccctgccaggcgctctggtttcacacctgtaatcccagcacttgaggatgctgaggcagaaggatcccttgagctcaggagtttgtggctgcagtgagctctgatcacaccactacaccccaacccgggttacagagtgagaccctgtctcccaaaaaagaaaagcagccacataggagaatccagacactggttctgcacccctggtgccacctttggggagcagaaagggaggctcagggcatatttactatcctctgcaaactgaatttgcagctgggaaagtttgtttcttccagagctgtgctcacctgggtgtcgggctggcccgagctcaggtgggcatgtagcagagcggccacctcatcctgctcagcctccagggcgatggccagggcactggtgccctcctgtggaacgttagggacagtcagatccctgagccaagccatgggcaccccccaagatgccagccccattgtggggtcttacattgtccaggatggcagggtcacagcctggctgggtgagcagcagccgcacggtgtccaggcgcccatactcactggcacacatcagcgctgtggccccatccgcatcctgcgcattcacatcagccccacacgccagtagggttgccaccatgtcctgtcggccatggctgatggccagcatgagggctgtctgccccgtctggggagtggggaggaagagggaacaggctggggtaggctcagggaagggaggtcacaggttgactcccaaagtggaagtgactcctggctgagagccacagtgggggcgcccacgcacctgactggccttggcattgacatcacccatgcagaagagtctctggaccacagccatgtcctcctcttcctgcctcacagaggtgagtgcagccagcatgagggccgagtagccggctcggttctggcggttgacctcgcaggcccctgggagagaaaagggggccgtccacggagatgccaacaccgcggcccgacttgatccactcacctccctgcaagcctcgggcacagcacctgcatatggggtggtctcaacgttctccccacaatagctacctggttcctccctcactaaggtgttgctcaaataccatctgctcagtgaaggaccttcctgtttcatcttttttttttttttttttttttttttgagacatagtctcgctctgtcacccaggctggagtgcagtggtgcgatctcagctcactgcaatctccacctccggagtagctggaactacagcatgtgccatcacacccagctaatttttgtattatttagtagagacagggtttcaccatgttggccaggctagtctcgaactcctgacctcaagtgatccacccaccgtagcctcccaaagtgctggaattagaggcatgagccactggcccagtggctatttcaaatcaagtccctgtttcaaatcaggcagggacttggttttgtttgcttctgtatccctcagtacttagaacaatacttggcacatagtagatgctcagttaaacatttgttgactgaataataaaaggatatgtttattttcatggccaccacccgccaagccaccatcattgctcccctaaagaacagtgccagcctccacccttctctctgaatccactccaggttccacacagcagccaggagcaactatttatttatttagagatggagtctcattctgtcgcccaggctggagtgcagtggcacgatctcagctcactgcaacctctgcctcccaggtttaagcgattcttctgccttggccacttgagtagctgggattacaggcatgcaccaccacgcccagctaatttttgtatttttagtagagacggtttcaccatgttggtcaggctggtctcgaactccgacctcatgattcgcttgcctcagcttcccaaagtgctgggattacaggtgtgagccaccgcgcctggccaagagcaacaattcaaaatgaatttggttgccaggacactggctcacgtctgtaatcccagcactttgagaggccgaggtggttgatcacttgaggtcaggagttcgagaccagcctggccaatgtggtgaaccccatctctactaaaaacacaaaaaatagccaggcgtggtggcaggcacctgtaatctcagctactcaggaggctgaggcaggataatcacttgaacctgggagctgcagtgagccaagatcacgccactgcactccagcctgggtaacacagtgagaccctgtctcaaacaaacaaacaaaaacacctgccaacaccttgatttcagacttctggccacctgttgtaaaaaaaaaaaaaaaaaaaaaaaaagccaggtgcagtggctcacgcctttaatcccagcactttgggaggctgaggcgggcggatcatgaggtcaggagattgagatcatcctggctaactcagtgaaaccccgtctctactaaaaatacaaaaaaaaaaaaaaaattagtcgggtgtggtggtgggtgcctgtagtcccagctactcaggaggctgaggcagaagaatggcatgaacccgggggacggagcttgcagtgagccgagattgcgccactgcactccagcctgggtgacacagctagactccatctctcagaaaaaaaaaaaaaaacctgccaacaccttgatttcagaagtctggccacctgttgtttgaagcagctcacagtgatactttgatggcagccctaggaagcaaaacagcctggtcaacactgcctatcctgaatgaaacacaaacgtgagctcagtttcctctgggatcagttctgttaccatcctggtccctgttcctcacagtgcctgtttggatgatatttcctggagtggctgttttaatccctgtctcctgccattctgaaggctctgaggattgaggtagtttaaggaaatgaatgagaagcttggggaaaggagcggggtcggggtcatgagatggataacctagtgaggaaggagagctgagatgagggactgaggagtaaagggttaagtcaaatgacagcaaaaatggaggccaggcatggtgactaacgcctgtacacccaaatgcttagggaggccaaggcaggaggatcacttgaggccaggagtctgaggccagcctgagcaacataggaagacccccccatctcttaaaaaatttggccggacacggtggctcacgtctgtaatcccagcactttgggaggccaaggcaggcagatcacaaggtcaagagatcaagaccatcctggccaacatggtgaaacaccgtctctaccaaaaatacaaaaaattagccaggcgtggtggtgtgcgcctgtagtcccagctacttgagaggctgaggcaggagaatcacttgaacatgggagacagaggttgcagtgagccaatatcacaccactgcactccagcctggtgacagagcgacactctgctccccgccaaaaaaaaaattagctgagtgtggtggttcatgcctgtggtcccaaatactcaggaggctgaggtggaaggatcgcttgagcctgggaggttgaggctgcatcacgccactacaccccagcctggaacaaagctgtctgtaaaaaggggttggggggacgttccctgtttgggtggcatgctgtgtgggtgtccatgccttccactaagacaccgtgtaaggcgtcaggtggtcagggaggagcacccagaaataaccagagtggggtccttgcaggctagccaaggacccacctatcttcctgctccctctcccttttctcttgcagctaccttgaccttgcttaactaaagaatcaccctggctaggcacagtggcttacgcctataattccagaacactggaggccaaggcaggaggatcacttgagctctggagttcgagaacagcctggacaacagagcgagacctcatctctactaaaaatacaaaaattagccgggtgtggtggagaacgcctgtaatccccgctacttgggagactgaggagggaggatcaattaggcccaggagttggagatcagcctgagcaacatggtgaaaccccatgcctacaaaaaaatttaaaaagaatcaccctttgttgacttcatcccctggttgtcttctgctacggcccttactagcatttgaaattatttcacgtttttacttgataatcgtctctctccactcttcactcaccacccccaccacacacacacacacacacacacacacacacacacacacacacacactcaaaactacacattcctgaaagttctgtgggagcaggcatttattcaacacttgacggtttgctgtgggtttgtcaggcaggcaggtagggtcgggtgagagaggggtatggagaagaatccacaacaggctgaaggaggatgacagaggcaaagagacaaggggtgggggcagtgaaacggagagggagcagtgggtaattgtccccgcaaggtccaaggattactggagttggggaatgggagcctgtgagccgagaagctgggaggtgagggtcgggaagtggggagctgagaagtgagattctgtaacgggcacaactattagggacatcaaggtctggggctgatgttatacctgtaaagctgatgtggggcagagtcaaggtcaaggaaggagagcagccaggaggttgcagggatcatgggggaggatgttgaaattgacaagtgggccgagcgcggtggctcacgcctgtagtcccagcactttgggaggctgaggtgggcggatcacgaggtcaggagatcgagaccatcctggctaacacggtgaaaccccatctctactaaaaatacaaaaaaaattagccgggcgtggtggcggacacctgtagtcccagctgctggggaggctgaggaaggagaatggcatgaacccgggaggcagaccttgcagtgagccgagatggcgccactgcactccagcctgggtgacagagcgagactccatctcaaaaaaaaaaaaaaaaaggaaattgacaagtgccggctgggtgcggttgctcactcctataatcccaatactttgggaggctgaggcgggcagatcacctgaggtcaggagttaaagaccagcctggccaacatggtgaaaccccgtctctactgaaaatacaaaaattagccgggcatgatggcgcttgccagtaatcccagctactcgggaggctgaggcaggagaatcactcgaacccgggaggcagaggttgcagtgagctgagatctgagatcacaccactgcactccagccaggcaacagagcaagactcggcctcaaaaaaaaaaaaaaaaaaaaaaaaaagactaactatagaatgctctggaaatgcaatcttgagataaggaggaactgactggaacagcctaggctctgttcctgtccccatctagaaacaggttgtcctttaatgcattagcccagcaattcctgttccccagggtataaaacctagagtgggccgctttccagggtccctcacctgccgtgcaagtggggcacctgcagaccagattccatacaccttgggcagccttcctgagccttgggggattggctcactgtcaatcttaggcttctgctgtcccttgctgcctatctgtaaataaggaacctgctttgtgtaacttgttatgtgaatgagtattctaccttaccagactcaggcaggtaggaaaagcacattcctaggtgcaatgggctgaaggggtaaccagtgcacagtggacctgctttgcagcaaggattaggctggagggagagagggagaactggccaggagctaaagttcaagaaaggaggagctacttgaggtcagaggtagaagccagagaggcagagtgaggaggggcctagtcagtgacaagatgctccaaggtagggtttgagaaggaagagggtgaaaggtctggaagtggagaagaagagcaaagtgcacacccacgtacctccagactctggattccaggggatgaaagaggaaacagcccctgaatgcaggggcgttagtgtatgtgacagcaagcaagtacaggcagaggggagatgagtaagaaccaggggaaggtctggagaggtggagccaaatgggaattagaggctgggcacactggctcacgcctataataccagcactttaggaggcctaggcaggaggatcacttgaggtcaggagttcaagaccagcctggccaacatggtgaaacccatctctactaaaaatgtaaaaattgtctgggcacggtggctcacacctgtaatcccagcactttgggaggctgaggcaggcggattacctgaggtcgggagtttgagaccagcctaaccaacatggagaaaccctgtctgtactaaaaatacaaaattagctgggtgtggtggtgcatgcctataatcccagctactcgggaggctgaggcaggagaatcacttgaatctgggaggcggaggttgcagtgagccgagattgtgccattgcactgtagcctgggcaaaaagggcgaaactccatctcaaaaaaaaaaatacaaaaatacaaaaattagctgggtgtggtacacgcgcctgtaatcccagctactcaggaggctgagacataagaatcacttgaacccgggaggtggaggttgcagtgagctgatattgcaccactgcagtccagcctgggcaacagagcaagatctgttcgaaaaaacaaacaaggccgggcaaagcggctaatgcttgtaatcccagcactttgggaggccgaggcaggcagatgagttgaggtaagcagtttgagcctggccaacatgttgaaaccccgtctttactaaaagtacaaaaattagccgggcgtggtggcgggcgcctgtagtcccagctactcgggaggctgaggcaggagaatggcgtgaacccgggaggcgtaggttgcagtgagcagagagatcatgccactgcactccagcctgggcgacagagcaagactccatatcaaaacaacaacaacaaaaaaggggtgggggggggattcaaatgtaggagataaaggggccaaggagcctggggcctcttgcagtgaccaacgacgcctacttccttgccgcagccccagccccctttaaggcatgagatgcccaaaaaattcacttagattcattcactgtcccctgtctcctacaatgccccagcttccagagcagctatatcctttcctaggtcataaagacctgcagggatgggagggatctgcgtgtttagggggttgggggcaggcagtgggacccgcctcaacctgcagttagtaccagaggtgcccaaaggctgactcagaggtttctgaacctgcaggagggtacctggagggagggggctcctggtggacagcgatttgtttaccacccaccagaccctttgtgcccagtttatcagggcaagcagctggaggtgggtggggcacagtgccccatcccaggaggagtcagagccctgcctggtgagtacctcccctccaggctggacactggggctcaggaactcggtgagtgctccagctggagattcagggacagagcacatgctggccatttactgatctcgtactacctgtattatcataggtacccagggagggaggccttgccaaccccatttcacaagcaagattaaataatgcccctaaactgaggtttacctaagtccagaactgtgtattccctccagctgcaaagtaggaggagcctcagggcagaactaggggtatggtggggccaaaaggcctctttttttttttttttttttttttttttttgagatggagtcttgcattgtggcccaggctggagtgcagtggtgctcactcttggcttactgcaacctctgcctcctgggttcaagtaatcctcgcacctcagcctcccgaatagctgggattacaggttcccaccaccacgcccagctagtttctgcttttttgttttgttttgtttttgtttctgagactgagcctcactctgtcgcccaggctggagtgcagtagcacgatctcagctcactgcaacctctgcctcccaggttcaagcaattctcgtgcctcagcctcctgagtagctggaattacaggcatgtaccaccacacccagctaatttttgtatttttagtagagatggggttttgccatgttggccaggccggtctcgaactcctgacctcaagtgatctgcccacctcggcctcccaaagtgctggggttaaaggcatgagccaccatgcctggctcagagggcagaaggcctttgggaacccagacaggaagaggtttaaaacccaaggaggttggctgggcgcagtggctcaggcctgtaatcccagcactttgggaggccggggcaggcagatcacgaggtcaggagatcaagaccatcctggccaacatggtgaaaccccgtctccactaaaaatacaaaaattagctgggcatggtggcgcacatctgtagtcccagctactcgggaggctgaggcaggagaatcgcttgaacctgggaggcggaggttgcagtgagccgagatcgcgccactgcactcctgcctggtgacagtgtgaaactccgtctcaaaaataaaataaaataaaataaaataaaataaaataataaaattaaaataaaataaaataaactcaaggaggagtggtgccctgtgctggacagccattctctgctttcctctccagagtctttgagcctaggtcagcccctgccctctccccccacccatttcctggtgtcccacccaccctcccttggctctgacccgtatccaggagcaggcttgcgatggccaggttcccgtgggacacactgtagtgcagggccgtgttcccgttgccatccgccaggttcaccacgtgcgccagcagttcgggtcccaggcgcctcaccccttccagcatcctggccacgggctccgcctgagagcgccgctggctggacactcgaaaccactcctgggccacgaggcgcactgcgccctgcaagggacaggggccaagataacatcggcgatggtccacggcggcgccgtggtgggggagctggggaggggcgggactgggaagagacccatttggcgtttccaggcaagtaaggaaggtcactcctcgtccaggtggggagccatgcgaacccagatggagggctggggccacacccctatcggagggcaaacacgggggaagggggtcctttccttccagggaagaatttgcgggagaacatggaacggggaaaggcaatgaacgcttgcccttggggagtccgggagtggggctggggccgggcctttttggggaaaccaaggaaagatcggcgctgtcctgggaaggagatcccttcggagagcctggggtcaggcgaggtgcctggcgggaagggatggaacccggtgtgctcccctaagtgggcgtcagaggtccttggaggctcccacgccactccctggtgctgcgctcccggggcactcacgccgtcgctggctactccgcggggccggctcagctgccgctgcagcgctacgcacgcctccctcagacgcgggctcagctcgcacctgcagaggaggccaggagagactcaggatggatcggggacagcgccgaccaggaggagggcagccgcctcctctccaaacaactagcgagcgccgctcacctcccctgtgccacctgctgaggctctgcctccgcctcgggctcagggtcccggatgtccccgccgctgggagggccaggggtgcccgagtcggatcccccgccgctgtcatccccggagcccgaggagctacccgggggctcggcgccaccgttctcgctgtcgccatcgctgtcgctggcgtcctcgctggaggagctctcgtacctgggggcagggtgggaggtgtctgctaaacctcccctgtgggctcgttctggagtcctgcgatgtgggtgtggccgttcccatttaacgatgaggaaactgaggattgcccagaccacgctgccagtagaggggcagagctggggttccaaccccagtctatgtcccggcagaagctgccacaggaggggaaaggcgctcactctccgttgaggaccccaacaaactgcaggctcttgggtccggagctgggttgggcaccaggtgtgccgtctctcttcttcatgatggatttgaggatgcctggcggggatgagatgagggcactgagttcgagtccggcgccgagtaagccagggcccagcgacggggtcgggactcacccgcgggcgccacggccctgtctccgtccatggatccgggcgagctctcctgagtcaaggagggcgcctctgccggggactcggtctgcgcggccttttcggcacagctccacggggtctgggtggtggcctcgcgtagctgggcccgggcccccgccgctgcctcctccgcagcctcgcgggcttcctccagctcccgcaaccggccccgcagaagctcactcaccccgcgctggtgctccagactggcgcgcagcagctctagctcgcgctcggcggccgcaggcagccccagcagcgcctcggtcacccacgcgtccgcctccacggtctcgggggcagcctccacgccggcctcccgggtctccggcacggcctgggcacccgcttctcgggtctcgggcacggcctcggcggccacctcccgggtctggggcgtcccatcgagactcccgacctccccgtcgaggacctggagcgcgccctcgctgcgccctgcagccaggccgtctgggctgtcagcccgggggctggccctggcacggccgccgcgctcggaggtggccaggcgctcggtgagccgccgcagctgggcgagcttgtccgggcgcgtctcagcctccccgtccggctcgggctgcgcgcgcccggccagcagccgcgccttctcggcgcgcagcgcgcgcacctgctcctgcagctcgggcagcgttcgcgcctggtcctcgagctcgcgcaggcgccgcagcgccgcggccatctgctcgcgcaccagctgcagttgggcagggccgggcgaagcaggggcaaggttaggggcggggctgctgcggccggacccgcgtgggctgcgcgggaccccgcggccggggctgggcgcgcgctcgtgtgtctgcgccagctccagccgccggctggtctcccggagcgtgtgctcgacgcgcgggttgcgcacgggcgcgcgcggcgacagcggctgcatcaggagccccgagggcgcgccctgggagagtatgcccggtgctccaccgtcgtcactggccagggactcgctggatgtccaggcgcctgggctacgtgcgcccgcgaggccgggccggggcgcgcggggacggcgcgaggtcgggggtcccggggcgcggcgggcagcggggccacgctccagctcctctatgtacttgaggaagtccaggtccaggtggaagccgtagggcgtctccaccgagtagggcgagctcgggctgcgtgcgcccccggcggcggggaccgggcacaggcgggggccgcccaggtctggaggcacgacgggggcacggggagggcgcatcagaacggggaaacccgggagatactaaacaaaccgagcgtgtcccccacccatgcccacgcttcacacctatctgtacccaagtattaactcaatcgcttgtttaatgagcacctactctgtgctaagcaagtttctaggcccgggggacacagcagtgagcaagacaaacatccctgtcctcctgtagaaagcagataagcatccttccaaacgatgcctacggcaatggtaataataacagggaataaacggaggaggcccgatttagcgtttggttgccagggaagctttcctgtgaggggactttcctgtggagtggagccctggcccggcgtgtggttcgcgcctgtagtcgcagcattttgggaggccggcacaggcggatcacctgaggtcaggagttccagaccagcctggccaacatggtgaaacccagtatctgctaaaaatacgaaaattagctgggcggtagtggcgcgcgcctgtaatcccagctactccggaagctgaggcaggagaatcacttgatcctggtaggcggagtttgaggtgagccgagatcgcaccaatgcactccagcctgggcgacagaagagaacctctcaaaaaaaaaaaaaagtagccctggccgggcgcagtggctcacgcctctatctcaacactttgggaggccgaggcgggtggatcgctagagcttaggagttcgagacaaacctgggcaacaaagtgagaccccatctccaaaaatatatatatacacatatacatatatatacatagctgtgcataatggtgagctactcaggaggctgaggtgggaggatcacttgagcctgggaggcagaggttgcagtgagccgagattgcaccactgcactccagactgggtgacagagtgagaccctgtctcaaaaaaaaaaaaaaaaaggttggcgaggggaagccctgcacgatgaggaggaagcagctgggaaaaggtttctagaagaaaacagcccatggaaataccctggggtaggagggaggagggtcagctggagtcacagcgagatggagaccagggtgtcccgagcagagtaaagaaggcagggggaagaggaatggacgcacaagggccacacttccctggtttgagggctacctggggtggcagggggtatagtccacttgcgattagtgccataggtggggtgttttttgttttgtttttttcttttttttgagacggagtcttgctctgttgcccagactggagtgctgtagtgcgatcttggctcattgcagcctctgcctcccaggttccagcaattctcctgcctcagcctcctgagtagctgggactacaggcacgcgccaccatgcctggctaattttttttttttttttttttttgagacgcagtctcgctctgtcgcccaggctggagtgcagtggcacaatctctgctcactgcaagctccgcctcccgggttcaagccattctcctgcctcagcctcccgagtagctgggactacaggggcaccaccatgcccggctaattttttgtatttttagtagagatgggatttcaccgtgttagccaggatggtcttgacctcctgaccttgtgatctgcccgcctcggcctcccaaagtgctgggattacaggcatgagtcaccacaccgagccgtgcctggctaatttttgtatttttagtagagacagggtttcaccatgttgcccaggctggtctcaaactcctgatctcaagtgatccgcccaccgtggcctcccaaagtgctgggattacaggcatgagccaccgcacccggccatgattgatgccataggtggtttaaagcaggctcatgacattggagaggactgcactctagggctgtaggctgcgtccacacacaagggcatcaagcgtttctctgtgcatgcgcacacacacacacatctctctttttgcacactcaccgggcaggttctgattcagggcaaacttggccatgtttcctgcagcagctgtcagaggcaccctgcaaaaggggtgaaggtggggctgggcgctgtccctctggctggagcctctggggcctgcctttgagtctaagcaaacaggacccaagagctctcctccacccagccacctccctccacacatggcctctccttcctcttccctaaagaaaccttgaaactttttttttttttttttttttgggacagagtctcgctctgtcacccaggctggagtgcaatgccacaatctcggctcattgcagcctccccctcccgggttcaagtgaatctcctgcctcagcctcccaagtggctgggattacaggtgcccaccaccacgcctggctaatttttgtatttttggtagagatgaggtttcaccatgttggccaggctggtctcgaactcctgacctcaagttatccgcctgcctcgacctcccaaagtactgggattataggcatgagccaccgtgcctagccgaccttgaaactttggatggaatgaatgatccccaggtgtcagatgtcagcctgctgggcaggaggaagcaggaaagacatcaagcaaaaagaagaaggtgaccaagaaaacaagggtagctgggagttggggaggcattccagacctgctgggttttctgataatctctggggaaaatcagaaatggacgctctatgtagtggactatgagcctttaggaaagaaagaccagagttggaagcccttcacaggatcattaaaaactcatctaggctgggcgcggtggctcacgcctgtaatcccagcactttgggaggccgaggagggcggatcatgaggtcaggagatcgagaccatcctggttaacacggtgaaaccccatctctactaaaaatataaaaaagtagccgggcgtggtggcaggcgcctgtagtcccagctactcgggaggctgaggcaggagaatggcgtgaacccgggaggcggagcttgcagtgagctgaggtggcgccactgcacttcagcctggcaacagagcgagattccgtctcaaaaaaaaaaaaaaaaaaaaaaaaaaggatgtaattgtgcatccaaatttttaccaaggtcagttgtgaaactcttgcaggaatgatggggaattgcgggctggatgcaccaaagatccaaatcaacaaatcaacggatacttgtctccctggaatgtcgctagcggagtgtcacaggcttgatccttggcttgtaagagtttgtaatgcaaacacaaaacacctgggttgtcagagctgtgactattcatggggctgcctgggaaagtgactgtttggatgacatgatggaggctgtaagaaagtgaggaagattgggccacatataataatgtgatatttaacaaggacaaatattgaatccagaactttggttcaaaaagcacagggtgaaatctcagcactctgggaagccaaagcagaaggatcgcttgagcctaggagtcaagacccacctgcgcaacatagcgagaccctatctctttttgtttttttttttttttgagacagaatttccctcttgttgcccaggctagagtgcagtggcacaatcttggctcactgcaacctctgcctcctgggttcaagtgattctcctgcctcagcctcctgagtagctgggattacagccactgctactatacctggctaattttttgtatttttagtagagatagggtttcatcatgttggccaggctggtctcgaactcctgacctcaggtgatccacccacctcggcatcccaaagtgctgggattacaggcatgagccaaggtgcctggccactatctcttttgtttgtttgtttttaaatagtgaaaccaccaagcacagtggctcacaagccattgctctccagcctgggcaacaagagcgaagctctgtctctaaataaataaataaaatagcgaaaccccatctctacaaaaaacacaaaaattagctggatgtgttggcatgcacctgtagtcccagctactcaagaagctgaggcaggagtatctcttgagtccaggagatgcaggctgcagtgagttatgatcatgccactgcattccagcctggttgacagagcaagaccttgtctcaaaaaaaaaaaaaaaaaaaaagaaaagaaaagaaaagaaaagcacaggaacatggagtgggaaagatgggctttggaaagcccacatggaaaaccttcagggaggggaaagtgcctacggtgtgcccttcctgattaaatgtcatcgccatagctggacacaatggtgcatgcctgtagtcccagctactcaggaggctgaggcaggagaatcgcttgaacctgggaggcagaggttgcagtgagctgagatcatgccactgcactccagcctgggggacagagccagactccgtctcaaaaaaaaaaaaccatatatatatatatatacacacacacacacacacacacacacacagcccccatacaacactttgcatactgcaaagtagtattattattcatattttacagatggagaaactgaggcacagaacaattaaatcagttgcctgtgggaagcaccctcagattgggctctgcccatctgcggaacccttgtcagcaggtccctgccacagcttctgactgccctttacctgtccagtcctccactgacaggcatctgccaaacccacttcatcctctccctgggccacggcccgtctgtgctaaccacatggcaacactcccagccaccccttctggcttctcgaatccctgggaccacctgtgtgcctgatgctatgaagcactgagcacccaccagccctcctgactcattaccctactccaccgctggggaaaccgtaactccatttcccacttctgtctggccgaggtccctgacctctcccttcccactccaaggccaggcagggggcctcttccagtccccaagcagctgtttcccgtcccttcacaccagctgcaaggggtggatcaacaggccagcgggtcatcgcagaggacagccaatgccgttcatcacttgttttcaggaaattgccagggaagaactgggttgtggaaaaagtccagatcaagggttggggggtctgggtctacttctcacacagctggccgtatgacgcaatggggtcagcgtcctcctccggtgacctggtcacacccaaatcccaggccctgggatctcagaagacagctgtgggccattcctaagacctaaactagctgaagcagttggatccagaggctgggctaagaaaggaatggatccctccagaatgtcaaataataacaacgcttttgatatttactatgggccagcctctagtctaaggaatttatggatatttactttttttttttttttttttagaggcaatgtctcgctcactctgtcacccaggctggagtcagtggctcgatcatagctcactgtggccttgaacccctgagctcaagtgatccgcctcagcctcacaaatagctgagactacaggaatggacctctacacctggctaattcaggctaatattttaaattttttggttttttgttttagatggagtcatgctctgtcgcccaggctggagtgcagtggcacaatctcagctcactgcaatctccgcctcccgggttcaagtgattctcctgcctcagcctcccaagcagctgggattacaggtgtgcaccaccatgcctggctaatttttgtatttttagtagagacggagtttcaccatgttggccaggctggtctcaaaccaggcgtgagccgtgcccggcctaattttattttttgtagatacaggtgtcttgctatattgcccaggctggcctccaactcctgggctcaagcaatcttcccagttcagcctcccagagtgctgggattacaagcatgagctactgcacctgaccttgacttattttttaaaatcctagctaaatccactgaggttggatttcctatgatcattgtcccttcccctattgtacagatggagaaactgagacacagaacagtttagtgtcctgcctgggtcctgtcataaacaggcagaggcaggttttaaacccaggcaggtcttccagagtccttgctttggccactacacttgaatgctttcttttatttttatttttgagacggagtctctgtcacccaggctggagtgcagtggcaggatctcggctcactgcaacctctgagcccagggttcaagcgactctcctgcctcagcatcctgagtagctgggattacaggcacttgccaccacagctggctaatttttgaatttttagtagagacgggtttcatcatgttggtcagtctggtctcaaactcctgacctcaagagatcagccctacttgacctcccaaagtgctgggataacaggcatgaaccaccaaggagcctcagggggcttgtccctcccagcctacacctgtgtcagactctgattgggggcggaggtgcccaccacctctgcggcttcaggggctggggcctcactaagtggggcgtttagctgccttccctctcctccgctccctgccctgactgtcacagctagatccggattctgtgcctgagaccccctcattaggccgtcagagccgacgccacacgccccctctcccgccccagggactattttgggacgcagagctgtgatcaccaaaccggagtggtgggggccacggcaggccagtgaggatcccagtcctggggagagggcgccttccaggaggccctgagtactggcagcccctgatgtctgctgggactctcagactcttgaggtgggtgggtgggggaccggtggcggcaggaaggtgggtgttaaagtcatcatcacccgtccacccccaggtcgtcctagccgcacagagacagagcagtttcctacaggaagcgccgccgggcggttccatccgctacccattgtctgcgggtccgggggccgtgcgtccctccccaaaacaccatttccgtgacacgctcccacacccagcccagcgcgaggggctggctggggtccccaggccgtcccgggaaagggtcccagggccggttgtggcattagggagcgaacgagccccgcagtgagctcccgaagggcgagaggggggcaagcccacgcctccagagccccccactctgctcgctacccacctgggacttccaatgtgggaggggtcccggccagaggacacgacgcccgccccgtcgcagcgggcagagccctcagtggggctggaaacgcagcgcagcgccgggtcccggtgcgtccccgaatccacccacccaggggtcccccatccgtgtccccgcaagctggcaatttacctgaagccgcagccccagccgcgcccgcacccgagcccgccccctcgaagtccggggactgattatcaaggccttcgccctaactgacggccacgccagccaaccagcacccgaggctctccaagccgcccagtgggacggtggggtgggacaggcaggcggggcctggaatgtaggggtggtgactgagggcgggccctggagtgacggtcgccgagcgctggctggcggcatttctgcaccagcagaggtcaagtctctgcccagcgccgggccaaggagcttggatttgatccacaggcacgagggagccatgggagaactatgagtagaagagtaacccggtgggatttctataactggcacttatttcgcagtgcctgggtgaagtatcaggtcccggatcttccccaccgcagggcctctgcacatgctgttccacctacctgaaatgctttcccttgcacctgtacacgtaggtactttttgaggctcccctactgttttttgttttgttttgtttttgttttttgagacggagtcccaggctggagtgcagtgacactcactgcaacctccgcctcctgggttcaagcaattctcctgcctcagcctcccgagtagctgggattacagacacacaccaccacgtccagctaatatttgtatttttagtagagatggggtttcaccatgttggccgggctggtctggaactcctgacctcaagtgatccgcccgcctcagcctcccaaagtgttgggattacaggcgtgagccaccgcgcccggccttccctactttctgaggttcagcttttgtgttgctgccccctaaattcctgacatagcccctccccagttagtatttttctcatcactctattgtattaacctaatagctacttttactatctggaaaaaaaaaaaaaagcagactctgttattggcaggcgcagtgactcacgcctgtaaatccagtatttagggaggcatagatgggaggatagcttgagccaggagttgagaccagcctgggcaacatagcaagacctagttctcaaaacaaaagaaaacaacaaaacaaaaagacaaaaacgaaacactcagttatttatttggtttattttttaatttaatttaatttttttttagacagagtctcgctctgtcccaggctggagtgcagtggtgcgatcttggctcactgcaacctctgcctcctggggttcaagcgattctcctgcctcagccttctaagtagctgggattacaggcgcacaccaccacgcccagctaatttttgtatttttagtagagacagggtttcaccatgttgcccaggctggtctcgaactcctgacctcaggtgatccgcccacctcagcctcccaaagtgctgggattacaggcgtgagccaccatgcctggctggttatttattggtttacctgcttgccatctcactaaagtgtcggcaccaaggccaggtggggtggctcatgcctgtaatcctagcacctcctgaggctgaggtgggaggatcttttgagcccagcagctcaagaccagcctgggcaacagagtgagactctgtctctaaattaagtgtcagcaccatgggaacaggaaactggttttgataactgctttatccagcgaccctagtacacagtagatgcttaataaatgtttgctgaaataatgttttctttttcttttttgagtcagggtctcattctgttgcccagggtagagtgctgtggcacaatatctcagctcactacaaactccgcctcccaggttaaagagatcctcctgcctcagcctcccaagtagctgggattacaagtgtgtgctacgcctagctaattttttttatttttagtagagacgggcttttactactttgcccaggctggtcttcaactccttggctcaagcaatccacctgccttggcctcacaaagtgctgggatcacaggcataagccacagcacctggccagaatatagtaatattttaaaatgtattttaacatctgatactttttaaaaaaaaacaaaattcctgggctattttaattggttgattctttcagttaaaactgtggaattctgtcgcgtttccccacagaaactccattggaattttcttctttgttcctttgagacaaagtttactctgttgccgatgctggagttctgtggcaagacctatggctcactgcagccttgaactcccagactcaagcaatcctcccacctcaacctcccgagtagctgggactacaggcatgtgctaccacgtccagcaggtttcttatttttgtaaggacagggtctctctatgttgcccaggctggtcgcaaattcctgggttcaagtgattctcctgcctcagcctccctaaatagtggcataacaggcatgagccgctgcacttggcctccattggaatgtttaaaatatatgtgtgtgtgtgtgtgtgtatatatatatatatatatatatatatatatatataatttttttttttttttgagacggagtcttgctctgtcacccaggctggagtacagtggtgtgatctccactcactgcaagatccgcctcccgggttcatgccattctcctgtctcagcctcccgaatagctgggactataggcacccaccaccacacctggctgtttttgtatttttagtagagacggggtttcaccgtgttagccaggatggtcttgatctcctgacctcgtgatctgcctgcctcagcctcccaaagtgctgggattacaggcgtgagccaccgcacccagccctaaaatatttttattgtggccgggtgcggtggctcacgcctgtaatcccagcactttgggaggccagggcaggcagatcacctgatatcgggagttcgagaccagcctgaccaacatggagaaactccgtctctactaaaaacacaaaattatcccagtgtagtggtgcatgcctgtaatcacagctacttgggaggctgaggcaggagaatcacttgaacctgggaggcagaggttgcagtgagccgagagtgagccattgcattccagcctgggcaacgagagtgaaactctgtctcaaaaaaaaaaaaaaaaaaaaaaaaatatatatatatatatatatatatatatatatatatatatagttgtaaaataaagcgtccatagatgcacacacacagcagattcaagaaaccacataaaacaaatgtatactctttccctaagtggcctgaggtaatctgggaaaatggttcgctatttacttgacccagagaaccccacaaaatcatgcaaatcaagaggttcaaatcttcatgttcacttggagaacactcatgaaactgcccaggccatcaagggtatgtatatatgaaaatccacgaagtatctgaaagatgtcactttacagaaactgtgtgtaccattccaacattacaatggtggagttggcaggtgtgcccaggccaagcagtggggctggacacaaagtcagtggcccagaaaaagtgctgaatttttgctgtacatgcttaaaaatgcagagagtggccgggcatggtggctcacacgtgtaatcccagcactttgggaggctgaggtgggcggatcacctgaggtcaggagttcgagaccagcctggccaacacggtgaaaccccatctctactaaaaatacaaaaattagctgggtgtggtggcacgtgcctgtagtcccagctaccagggaggctgaggcaggagaattgcttgaacccgggaggcggaggttgcaaagccgagattgtgccactgcactccatcctgggcagtagagcgagactccgtctcaaaaaaaaaaaaaatgcagagagtaatgctgaacttaagggttatatgtagattctctggtcattgagcatatccaagtgaacaaagtacctaagatgcgtcgccagacctacggaactccggtcggattaacccatgaatgagttctccctgccacactgagatgattcttactgaaaaggaacagatttttcctaagccagaggaggaggttgcccaaaagaaaaagatatcccaaggccgggcgcagtggctcacgcctgtaatcccagcattttgggaggccgaggcgggtggatcacctgaggtcgggaggtcgagaccagcctgaccaacatggagaaaccccatttctacttaaaatataaaattagccgagcgtggtggcgcatgcatgtaatcccagctactcaggaggaggctgaggcaggagaatcatttgaacccgggtggcagaggttgcggtgagccgagatcgcaccatcgcactccagcctgagcaacaagagtgaaactccatctcggaaaaaaaaaaaagaaagaaaaagatatcccagaagaaactgaagaaacaaaaacttatggcatgggagtaaattcagcattaaaataaatgcaattaaaagtaaaaaacaaaaacaaaaaacaaaacaaaaccaacaacaacaacaaaaaaccccacaaatgtatagtttaaggagttcctccagggggtagttctcaaccaggagtgattttgccccatgggagaatgtttgacaatatccaggagcacttttgggtaatgaggaggcgggtgtttttggcctctagagggcggaggccaggaatgtagctaaccaccctgcaatgcacaggccatccccaaggaccaagaattatgtggcctgaatgtcaagagtgctaagtttcagaaacccagtgctgagatgaaggtcatcgtcgcctccacccgggccaaccaactgcacttgccagctaccccagaagcgcctccgtggactatgtcctagtcacagctgcccctcactccctaagtaaccactgttttgtgacttttatttatttgtttgtttatttatttatttatttttgagacagaatctcgctctgttgcccaggctggagtgcagtggcatgatctcagctcactgcagtctcctgggttcaaatgattctcctgcctcagcctcctgagtagttgagattacaggtgcccgctaccatgaccagattttttgtatttttagtagagatggggtttcaccatgttgaccatgctggtcttgagctcctggcttcaggtgatccacctgcctcggcctcccaaagtgctgggattacaggcatgagccaacacgcccggccctgtgtaggtttctgtttgtttgcttatttatttatttcgagacagagtctcactgtattgttcaggctggagtgcagtggtgcaatcaatgctcactgcagcctggaactcctgggctcaaatgatccttagcctcctgagtagctgggagacaggtgagcgccactgcacatgtatagttttattatccaaatgtgaatctgtagacactggagtttagtcttgcccattcaaaaagaaaatgatatgtcttttaagctccccctgcccgtttttttttttttttttttgagacggagtcttgctctgttaccaggttagagtgcagtggcgtgatcttggctcactgcaacctccatctcccaggttcaaccgattcccctgcctcagcctccagagcagctgggactacaggcacaagccaccatgcccagctaattttttgtattttagtagagatggggtttcaccatgttggtcaggatggtctcgatctcctgaccttgtgatcgaccagcctcagcctcccatagtgttgggattactggcacgagccaccgcgcccggcctaagcctgtttatttatttatttatttatttttaattttatttttttgagatgcagtttcactcttgttgcccaggctggagtccagtggtgcaatcttggctcactgcaacctctgcctcttagattcaagcgattctcctgcctcagcctcctgagtagctgggattacaggcatgcgccaccacgtccggctaatttttgtatttttagtagagatggagtttctccatgttggccaggctggtctggaactcccgatctcaggtgatctgcccacctgggactcccaaagtgctgggattacaggtgtgagccaccgcgcccggcctaagcctcttttaattcacaggttcctctccatccctccctttcccttacaatagaagcattgcatgcctgggcatggtgcctcacacctgtaatcccagcactttgggaggccgaggcagcaggaacggttgagcccaggagttcgagattatcctgggcaatatagtgagaccccccatctctacaaaaactacaaaaattagctgggtatggtggcatgcacctgtagtcccagctactggggaggctgaggtgggaggatcgctcgagcccaggtgatcaaggctgcagtgagctgtgatcacatcactgcactccagcctgggaaacagagtgagaccctgtgaaagaaagaaagaaagagagaaagagagaaagggaggaagggaggaagggaggaagggaggggaagggaaggaggaaggaaagaaggaaggaaggaaggaaggaaggaaggaaggaaggaaggaaggaaggaaggaaggaaaaaaaaaaaaaggatcgcacaattggctgcttgtcctgaagtgtttcctatggtctaaatgttgctgatcctacactcattgtgtagttagttcaggatgttcttctgtccttggtattccctgcaaattggcggttgcttctagaactggggtcagactcagatttgattactttgacatgactactgatggcgttctgttctttcactaggaggcttgtgatgtttggctgtgcctcctttcctcagtccagtagccatcgagaattaactccttagagattacaaaatagtgatgtcatatctcttgtgtttcttccttctttatttacttatttaattttttttatgagatggaatctcgctctgtcacccaggctggagtgcagtggcacaatctcagcttactgcaacctctgcctcccaggttcaagtgattctccttcctcagcctccctagtagctgggattacaggcttgtgccaccacgcctggccatttcgtccttatttgttagttgaattcttttttttttttttatgcaagatacttcttcttatgtactatctggttttccagtgacacttttagagaagaaaggcaagataaaaacctgattattggccaggtgcagtgacacattccggtaatcccagcacattgggaagctgaggcaggaggatcgcttgagcccaggaggtcgaagttgcagtgagccatgattgagccactgtactgcagcctgggcaacagagtgagaccctgtctcataacataaaatcattatggctggcacagtggctcacgcctgtaatcccagcactttaggaggctgaggcggacagatcacttgaagccaggagttcgagaccagcctggctaacatggtgaaacccttcctctactaaaaacacacaaaaaatttagccaggcatggtggtgcatgcctgtagtcccagctactccagaggctgaggcatgagaatcacttctcttgaacccaggaagcagagattgcagtgagccaagatcacaccactgcacttcagcctgaaagacagagactctgtctcaaaataaaaaagaagagaaaggtaggagggtcagagttatagaaggtgttatgatggaagcagaggggtgtgtgtttgtgtgtgtgtgtgtgtgtgtgtgagagagagagagagagagagagagacagagagagagaaaaggagattggaaattgcggccagagtggtggctcatgcctgtaatcccagaatgttgtgaggctgaggcaggcggatcacttgagttcaggagttcgagaccagcctgaccaatatgttgaaaccctcgtctctactgaaaatacaaaaattggccaggcgcggtggctcacgcctgtagtcccagcactttgggaggccaaggcaggcggatcacgaggtcaggagattgaaaccatcgtggctaacacggtgaaaccccgtctctactaaaaatacaaaaaattagacgggcgtggtggcgggtgcctgtagtcccagctactcaggaggctgaggcaggagaatggcatgaacccgggaggcggagtttgcagtgagccaagatcgcaccactgcactccagcctaggtgacagagcgagactccgtctcaaaaaaaaaaaacaaaatttagctgggcattgtggcgtgcgcctgtaatcccagctcttcaggaggctgaggcaggagaatcacttgaactcaggaggcagaggttgcaatgggctgagagtgcagtattgcactccagcctgtggtggtgggcgcctgtaatcccagctactcagaatcccaccacaggtgctcagcacacagtagacactcaataaattttcactgaatggaaagattgaaaggtgatttcaagctccctgcagaccaagaatttctgaagagtattcctgcctagctagccagtggggagaggtataagaaagaaaaggggccgggcacggtggctcatgcctgcatgcccagcaatttgggaggttgaggtgggcggatcacctgaggtcaggcgttggagaccagcctggccaacatggcgaaaccccatctgtactaaaactaaaaaatgtatccgggcatggtgctgtgcacctgtaatcccagctactcaggaggctgaggcagaggtttcagtgagcgaagatcgcgccactgcactccagcctgggtgacagagcgagactctgtcaaaaaaaaaagaaagaaagaaaagagagacaaagaaagaaagaaagaaagaaagaaagaaaggagggagggagggaaggaaggaaggaagagagaaaggggggaaaagaagaaagaaaaagagggagggagggaaagagaaagaaagaaaaagaaggaaagaaaaaggaagaaaggagggagggagggaaggatggaaggaagaaagagagaaagaggggagaaaagaaagaaagagagagagggagggacggaaatagaaagaaagaaagagaaagaaagaaagaaggaaagagaaagaaagaaagaaaaggaattttgcttgcgtgggtgaggaagatgctcttagacctcttaaacaacttccctcctcccccacattcctaataccctgggtgttcatggtagaaaatgtgacccttctctctcccaccctgtcccaggctgaggcttgagtcagaaaagaaaagagagagggaggaggttcccgggcactccagaatacattgaaccccttgggagccactttcagctcctttgccattttaggggcctcctggaaactccaaggcacccctgcccccatctggaatgcttaactgcccagagagactgcgcctgtctctgaacagttttttttttttttttttttttttttttgagacagtctcgctctgtcgccaaggctggagtacagtggcgcgatctcagctcactgcaagctccgcctcccgaattcaagcaattcttcagcctcagtctctccagtagctgggattacaggcacctgctatcagcccagctaattgtttgtatttttagtagagacagggtttcaccatgttggcgaggctggtctcaaattcctgacctcaggtgatccgcccacctctgcctcccaaaatgctgggattacaggcgtgagccattgtgcccggcctgtctcagaacattgacacccctgacatgagagctaattggccccagtcaggagcttcaaaagacagcattggccagttgtggtgtgcatgcctgtaatcctagtgcctcgagaggctaagacaggagaattgcttgaggctgagagtttgagaccagcctgggcaacaaagcaagaccctgtctctagaaaatttatttatttatttttgagacagagtcttgctctgtcgcccaggctggagtgcagtggcgcaatctcggctcactgcaagctccgcctccagggttcaagcaattcccctgcctcagcctccctagtagctgggattacaggcacctgccaccatgcctggctaattttttgtatttttagtagagatggggtttcaccgcattagccaggatggtctccatctgctgacctcgtaatccacccgcctcgacctcccaaagtgctgggattacaggcatgagccactgcacccagcagacatttttaaaaattagctggggatggtagcatgttcccgtagtcccagctactcaggatgctgagatggcagaattgattgagcccaggaatttgaggctacagtaagctatgatcacgccactgcactgcagcctgggccaagagcaagactgtctcaaccggggtgcagtggctcacgcctataatcccagcaatttgggaggctgaagcgggtggatcacttgaagtcaggagtttgagaccagcctggccaacatggtgaaacctcatctctactacaaatacaaaagttagtcgggtgtggtggcgtgcgcctgtagtcccagctacttgggaggccaaggcaggagaatcccctgaacccgggaggtgtaggttgcagtgagccgagatcgcgccactgtactccagcctgggcgacagagcgagactctgtctcaaaaatcatcatcgtcgtcatcatctccacttcccccttgatttactcagtcttctcgagcctcccacagcgggcgggcagccgccaggaggccttgaacttcctctcaggcgcctgggatcagcgggaaaggagcgcgtctgagcggccagaacagctgctctcgagttcaccaccagagggcgctgctatctagggtaaaccccccggggccgcggttgtcaaaccgggtatatacagagaaggaattttcggggtggggggtagtgggggaatctatctctagctttttcttattgttgtaaaaataatttcccaaaaataaaaataggctgggcgcgatggctcacgcctgtaatcccaacactttggaaggccgaggcgggtggatcactggagatcaggagttcaagatcaacatggtgaaacccagtctctgctagaaatacaaaaattagccgggcatggtggccagcagctgtaatcccagctactcaggaggctgaggcataagaaccccctgaagctgggaggcataggtagtagtaagtcgagatcgccccactgcactccagcctgggtgacagaacaagacgctgtctcaaataaataaataaataaatcgtaaattacaaaacaatgacaagctttaaaaataggccaggtacggtggctcacgcctgtaatcccagcactttgggaggccgaggcgggcggatcatgagatcaggagatcaagaccatcctggctaacacggtgaaaccccatctctactaaaaatacaaaaaattagctgggcctggtggcgggcacctgtaatcccagctactcgggaggctgaggcaggcgaatggcatgaacccaggaggtggagcttgcagtgagccgagatagtgccactgcactccagcctgggcgacagagtgagactccgtctcaaaaacaaaacaacaacaaaattaaatgaaaaataaaataaaagaggtcacggttttgggcaccgttaattccagctagtgagcaggctgagatgggaggatttcttgggcccagtagttccaatccagccttggcaacacagcaagacatcccaccaccaccccacgtgccctcccccgccaccgtcttaaaagacagaaagagagattcaatggtttggaactaaagagaactaggttcaaatctttttttttatctctttttttgagatggattctggctttgtcacccaggctggagtgcagttgtgcgatcttggctcactgcagcctctgcctcctaggttagagcgattctcctgcctccgcctcccaagtagctgggaggtagcactcaccaccatgcccagctaatattttgtatttttagtagagagaagttttcaccaggttggcctggctggtctcaaactcctgatctcaggtaatctgcccacctcagcctcccaaattgctggaattacagacatgagccaccacgcctggcctaggttcaaatcttgacccttctgagctgtgtgactttgtccaaattcctaaaggtctcagaagctcaatttatctcctttcagggaccgacttgaggttgagataaaatggattacacaagtgtctgatggtgtaaaggtggcactaaataaatgtacgctgctacagttattatttccttagtgacttcatagctgtctgccctgcaatgtacaagttcccagactggaaggaattatggggaaaagctaataggggagggtggaaaggcaaccccgttcccttctgagcaccagcccagattctgagtcatcctttctgccctgagtgtttgaggtcctgctcttgggctgacctttcttggtgacctggatgtgagtacagtgtggcaggaagactgtggttagttgctgggggcggtagaggccagtcactggacacgatgtgccattacatagtcctaacaaccttgtgggcttgtctgagaagaatcctgcatgtctcaagccagagagaatttttcatgctcttccttgaacctgagtcatctatttcctgtacactttgtctaggactctgtcaagcatctctcagtcttaggacccctgctccaggaatccttacctaatgggattgacatcttttctatactcttctaggcctgtgtgcttaccccattgcagcattgaccatctaggattcaacttatgtagttaaatcttagcaccattcatggtgccaatgagcaaacagatatcatgtgcctcctgatatcatacactgagaaggacacaacatcactgccaaaaatacataacaggcaccttaaggggaagaaacatctgcatcagacaaatgcaaaatggaggacgtgctacaaaaaaccggtgtgtacatctcgaaaatatcagtgtttggccaggcatagtggcttatgcctgttgtcccagctactcaggaggctgaggtgggaggatcacttgagcccaggaggttgaggctgcagtgagctgtgatctcactgctgcactccagccttggtgacaaagtgagaccgtgtctcaaaaaatgccagtgccctgcctggtatagcgaatgcacctgtattcccagttactcagtaggctgaggcaggaagattgcttgagtccagatttgagaccagcctcggcaacataacaacgaccctgtctcagattaaaaaaaaaaaaaaaaaggaccaacaggatatgacaatgaaatgcagtggatgattctggatagggtcctgctcataaaaaacatggctgtgaggccgggcgcggtggcttacgcctgtaatcctagcacattatagtgtatccgggaggatcatgaggtcagagttcgagaccggcctgaccaacatagtgaaaccccatctctactaaaaatacaaaaattagctgggcatggtggcgtgtgcctgtattcccagctactcaggaggctgaggcaggagaattgcttgaacccaggaggctgaggttgtggtgagctgagatcatgccactgcattccagcctgggcaaaagagggagactcagttttttttaaaaaaacaaaacaaaacaaaaaacagctgtggccaggcacagtggctcatgcctgtaatcccaggtctgtgggatgccggggtgggaggatcgcctgagttcaggagttcaagtttgagaccagcctgggcaatgtaactaaaccctgtctctaccaaaaaataccaaaattagcctggtgtggtggcatgtgcctgtagtcccagctgctcaggaggctgaggcaggaggatcacttgagcccaggagttggaggctgcagtgagctataatcgcaccactgcactccagcctgaatgacagagtgagaccctgtctccaaaacaaaggaaaacaaacagaaacacaaaccacagctgttcaggtcatgcttgacacaattgatgaaactggaatatggaccatagattagataacagtactatgtcagggtcaaatttcctgaaattgctagctgtaccacggttatataaacacttttttttcttagtaaagggcaaaaggcacacgttatgtgtgcaatatatccttaagtgggtcagaaaaagaagatgtacaaaaaagtgtgtattatctcaccctgcatgagtgtattatataaatatataagaatacgtctctatgtgagtgtattttatctatctatgcacttatgcacttatgtattacgtatacgtgtgtgtgtgttgttgttgttttgtttcttgttttttttgtttttgagacagagtctcgctctgttgcccaggctggagtgcagtggcctcatctcggctcactgcaagctccacctcctgggttcacgccattctcctgcctcagcctcctgagtagctgggactacaggtgcctgccaccacgcctggctaattttttgtatttttagtagagacggggtttcaccatgttagccaggatggtctcgatctcctgacctcgtgatccacccgcctcggcctcccaaagtgctgggattacaggcgtgagccatcgcgcccggccttttttttttttgagatggagtcttgctctgtcacccaggctggagttcaatggcgcagtcttagctcactgccacctctgccttccaggttcaagcgattctcctccctcagcctcccgaggagctgagtttacaggcctgagccaccgtgccagacctcttttttttttttttttttttttgggacagagtctcactctgatgcccaaatgggagtgcaatggtacgatcatagcagactgcagcttccacctcctgagcttaagttgtcctcttgcatcggcctccttgagtacgtgtgggagtacgggtaggcaccaccacacctggctaattttttattttatttatttttttatttttatatttatttatttattttgagatggagtttcgctcttgtcacccaggctggaatacaatggcacaatcttggctcactgcaacctctgcctcccgggttcaagtgattctcctgcctcagccccccaagtagctgggattacagatgccaccatgcccggctgatttttttttgtattttcagtagaaatggggtttcaccatgtcagccaggctggtcttgaactcctgacctcaggtgatccgcctgcctcggcctcccaaagtgctaggattacaggcgtgagccgccacgcccagccctaatcttttattttttggagggatggggtctcactttgttacccaggctggtctgaaatccctgatttcaagcaatcctgccacttcagtctcccaaagtgtcaggattacaggtgtgagacaccctgcccagcctgtttgtgtatgttatatatatgtatctctctgtatgtaagtgtggctctctccatatatgtatatatatatctttatgtgtattgcatatgtatgtgtctctgtgtgtattatatatatttatattttatgtctctatgtgtgtttatttattttttggatacagggtcttgatctgtcccctaggctagagtgcaggggtgcaatcttggctcactgtagctttgagcctcgacttcccaggttcaaatgatcctcccacctcagcctcccaagtagctcatactacaggaatgtgccaccacgcctagctattttttttttttttgagacagagtcttgctctgtcacccaagctggagtgcaatggtacgatctccgcttactgcagcctccacctcctgggttcaagcgaatctcccacctcagcctcacaaatagctgagattacggccacacaccaccatgcctgctaatttctgtatttttagtagagatggggtttcaccatgctggccaggctggtctcgaactcccagactcaagtgatccacccacctcagcctcccaaagtgctaggattacaggtgtgagccaccatgccgggccccagctaatttttttttttttttgagacagagtctcgccctgttgcccaggctggagtgcagtggcgcaatctctgcttactgcaccctctgcctcccgggttccagcgattctcctgccccagcctcccgagtaactgggattacaggcgcgcgcctccacgcctggctaatttttacatttttagtagagaccgggtttcaccatgttggtcaggctggtctcgaacttctgacctcacgatctgcccaccttggactcccaaagtgctggtattacaggcatgagccaccgtgcccagcctggccccagctaattttttaaattttttgtacagacagggtcttgccatgttacccaatcttgaactcctgggctcaagcagtcctcccaccttggcctcccaaagtactgggattacaagcatgagccaccttgcctagcttaatggcatttacatttgtagtgaaatacacataacaggctgggcgcagtggctcatacctgtaatcccagcactttgggaggccgaggtaggcggatcacctgaggtcaggagttagagaccagcctggacatggcgaaaccccgtctctactaaaatacaaaaattagccaggcgtggtggtgggcacctgtaatcccagctactcgggaggctgaggcaggagaatcatttgaacccaggaggtggaagttgcagtgagcagagattgcaccactgcactccagccttggcgacagagcaagactctgtctcaaaaaaaagaaaaaaaaaagaaaagaaaagaaaaaaaagaaaaagaaaaaaagaaatatacataatataaaattggtcattttaacaatttttaactatgttggccaaagtagcccacgcgttgggattggagacccggtcttgcccaccgtgatcgccccagtacagtgcctggcatatagtaggtgctccaggaacaattgatcaggatgactttgtctttgctgggtaagaggccacattctaaaggtcagtttttggccaggcacagtgactcacacctgtcatcccagcactttgggaggccgaggcgagtgaatcccttgagctcaggagttcaagaccagcctgggcaacacggcaaaaatcctgtctctacaaaatctacagaaattaggcaggtctggtggcacatgcctatagtcccagctgcttgggaggctgaggtgggaggatcacttgagcctgggagtttgaggttgcggtgagctgtgattgtgacactgcactccagcctgggtgagtgagacccatctcagaaaaaaaaaaaaaaatacataaaacagggctgggcgtggtggctcatgcctgtaatcctagcactttgggaggctgaggtggtggatagcctaagcttaggagtttgagaccagcctgggcaacatggcgaaaccccaccccctctactagaatacaaaaaattagcgggcgtggtggtgggcacctgtagtcccagctactcaggaggctgaggcaggagaatggcgggaacctgggaggtggagcttgcagtgagccgagatgaggccactgcactccagcctgggcaacagagcaagactctgtctcaaaaaaaaaaaaaaaaaaaaggctaggccaggcacagtggctcacacctgtaatcccagcacgttgggaggccgagacaggtggatcacctgaggtcaggaatttgagaccagcagagccaacatagtgaaaccccgtttgcactaaaaatacaaaaaattagtcaggtgtggtggtgcacacctgtaatccccgctactcgggaggctgaggctggagaatcgcttgaacctgggaggcagaggttgcagtgagcggagattgcgccgttgcactccagcctgggcgacaagagggaaactccatctcaaaaaaataaataaataaaataaaaaataggctgggcgcggtggctcatgcctgtaatcccagcactttgggaggccgaagcgggcggatcacgaggtcaggagatcgagaccatcctggctaacatggtgaaaccctgtctctattaaaaatacaaaaaattagctgggcatggtggcaggtgcctgtagtcccagctactcgggaggctgaggcaggagaatggcactaacccgggaggtggagcttgcagtgagccgagattgcgccactgcactccagcgtgggcgacagagcgagactccttctcaaaaaataaataaataaataaataaataaataaataaataaaaaataaagagcagtttttagaataaaatctagagccaacttgaggcgacagtatagactcttttgtagattgctcacagcaggtgcccttaagaccctgggtctgtgatgtgttttgtgctgtgggacacatggctccaaagaagtccctgaaaatcagatcatgaaaaggtcatcaggttggggaagtaattgatcagttctctcagtttaagaaggtggggaagaggaggagcttgcattctgggatagcctgggatagctgtgtccctactcagagagaggctgggggcttgggggtggacaggccagacggtgaccatctgaacctactcctcactggggttttcctccctccctttcctgtccactgctgctgggagggatttgctgtcctggcatctggcccagctgacggggccaagtgtatgagtggcagcctgcacgtcagcccttgggtgtgcagtttcagattccagagaatgagctggcttggagccctgctgagtcaatgcccttctccttgccagtgctctgagccaacctgccccgagttcttcctggcaggctggttttctgtgccagcctccccttcctgacagggtataggggaatgggtagggaagaggcagaggagatcggtgcaagtttgaatgaacacttagccctgtggaatgaatgtggtccagccctttagcctcactcagtacttcctttgtcccaactctatccctaccccaggctcagaatgttggggtatctccacctgcctgagaacttcaaacatacaggggctgggcttagagggcagcagcaccttcgttcagtgcatgagtgaatgaatgaatgagggagagaaagaggaaggtcttccatgtctgaaacttttttttttttttttgacacacagtctcactctgtcacccaggctggagtgctgtggtgcaatctcagctcactgcaacctccgtctcctgagttcaagcgattctcctgacacagtctcccgagtagctgtaagcacgtgccaccacacccggctaattttttatttttagtagagacgaggtttcaccatgttggccaggctgatctcgaacccctgacctcaggtgatccgcccccccccccctcccaccacccggcctcccaaagtgctgggattacaggcgtgagccaccgcgcctggccacagacttttattttatttcttttttagagacaggatctcactctgttgcccaggctggagtgcagtggcaccattgtggctcactgcagcctctacctcctgggctcaagtgagcctcccacctcaggctcccaagtagctgcgaccacagtcatgggcgaccgccctggttcctcccttccttgtgtctcctctttctgttctctaagttcctgctttattataggcaaagctcaggacattaaagaccctggcggtagagggtaggctatgggggtgaggccctgatccaagtcctgccgctaaggcactcataatttcgggctcaggggagaaatggaagtcaaagaatctcataaacacagctgcgatgacgaaccctttcacgggaaggaacatgcgagcccagaaaagtctctcctggtcttgggatggaggtcacacgaagcctccgcaaggcaaggacttttggtgagttccgggctccgctgaactcagctctttttcttttccttcctttctttccttcttcctttctttccctccttccttccttcctctttctctctttcctttctctctctcttttctctctctctctccttcttccctccctccctacctctctctcttttctttttccgtccttccttccttctttccttctttctctctcttttctttcttttcttttcttttctcttctttcattttgagacgtactctggctctgtcgcccaggctggagcgcaatggcgccatctcggcgcactgcaacctccacctcccgggttcaagcgattctactgcctcagcctcccgagtagctgggactacaggcgcgcactaccaagcccggctaatttttttttgtatttttagtagagactgggtttcacgatgttggccgggctggtctggaagtcttgacctcaagcgtgcgccctctccgccactgggtaaggcgggggcggaatagggggcttgcaatttcacactagaggcgggcaccgtgggggaaagaagagtcacgtctcccacggttcgtagaggaaggcctgcctgagcctggagcgggggcgggagagccacagtttggcatccccagggcatcccccagcccgcagactaccaggcctccagaggacaggaccccacccccggccacaggccctgcccccagcactccccgcaccccgcctccaagactcctccgcccactccgcacccaacttataaaaaccgtcctcgggcgcggcggggagaagccgagctgagcggatcctcacacgactgtgatccgattctttccagcggcttctgcaaccaagcgggtcttacccccggtcctccgcgtctccagtcctcgcacctggaaccccaacgtccccgagagtccccgaatccccgctcccaggctacctaagaggatgagcggtgctccgacggccggggcagccctgatgctctgcgccgccaccgccgtgctactgagcgctcagggcggacccgtgcagtccaagtcgccgcgctttgcgtcctgggacgagatgaatgtcctggcgcacggactcctgcagctcggccaggggctgcgcgaacacgcggagcgcacccgcagtcagctgagcgcgctggagcggcgcctgagcgcgtgcgggtccgcctgtcagggaaccgaggggtccaccgacctcccgttagcccctgagagccgggtggaccctgaggtccttcacagcctgcaggtacgtgtccccagggctggttctccgcgcccctagtggctctcctggcttggaagggtatggacaggagtggggcgtgggggcggggtgcgcaactgtggctccctgggcttccctgcgtcaagggatgggctccccccttaggaagccgaggagggaggttcgctcaaggccaggaattcaagaccacctaaagcaaaatagcgagacccccgtctcttctacacacacacacacacacacacaaaataaataaaataaaataaaataaatataaaattaaaaaacgaccgggcgcagtggctcacggagcctccacctgctgtcgagactagcctggccaacatggagaaacctcgtctctactaaaaatacaaaaaattagcctggcatggtgtgcatgcctgtaatcccagctacttgggaggctgaggcaggagaatctcttgaacccgggaggcagaggttgcagtgagccgagatcgcagcactgcactccagcctgggcaacagagtgagactcctcaaaaaaataatagcgataaaataaaaataaagccaggtgcggtgactcacgcttgtagtcccagcactttgggagggcgaggccagtggatcacctgaggtcaggagttcaagaccagcctgaccaacacagtgaaaccccgtctctactaaaaatacaaaaattagctgggtgtggtggtgggcgcctgtaatcccagctactggggaggctgaggcaggagaacctcttgaacccgggaggcggaggttgcagtgagccgggatcatgccattgcactccagcctgggcgacagagctcgactccatctcaaaataataataataataaataaaataaaatacaaatacaaaaattagccaggtgtggtggcagctacttgggaggctgagacacaagaatcacttgagtctgggaggcagaggttgcagtgagccaagattgcgccactgcactccaacctgggtgacagagcgagactctgtctgaaaaaataaaaaataagccaggcatagagctgcatgactgtagtcccagctacacaggaggctgaaaacaggaggatcgcctgaccccaggagttggaggctgcagtgagctgtgacagcaccactgcactccagcctgggcgagagaacgagaccccgtcattgggaaaaaaaagaaaaaagaaagactcccttgcctggcctcagcggatggagatttggaaggatggatgagtggatgaattaagaggttggggtaggcaagctgggtcctcaccaaggttttcacccctccccagacacaactcaaggctcagaacagcaggatccagcaactcttccacaaggtggcccagcagcagcggcacctggagaagcagcacctgcgaattcagcatctgcaaagccaggtaaccctaggatcaagggagaaaaggtccctctgatagctggaccccaggttgagagggaggtggtgagaactggacgtgtggctggggacgtggggccaggcaggacctgacaccctcctcccgtcccatcctagtttggcctcctggaccacaagcacctagaccatgaggtggccaagcctgcccgaagaaagaggctgcccgagatggcccagccagttgacccggctcacaatgtcagccgcctgcaccgtgagtgtctgcccctcgatgctctccggtggccacccctaccccgccacttgccattgctggtcctctccttgtcaggtccaccttaaggagaagatgtcctggcctggagtccctgagggctcaccagtctctgggtcaaagctgatgggagcacctccttcctcagccctgacctggcccagccaggccacccaacccttctcctctgcaagccagtgggctgtccctgaagccctgctgatcactgattggaacagaggtggagaaagaggtcttgagggacttgagctgcaggggtgctggagaaggtagaaatggggttcggggtgccatcctgaaggttagaaccttctaggggagggtgtcatggaggagggggtgccaggtagtagtgtttgtagatttgggccctccacaatgtcttggggtatgtgggaattagggctgggaacccccagctcccagaccagaaacactcttgtatcttacaaatccaatgctccaggtccctgacccctcttcctccttcctctcttgttctcctcctccctccccgcccccgccggccccctccccaccgcagaaagtgggcttttgctgccaccacaagttgtaggtgctttattcccaaatctccgttcatctcgaaccacagcatgtccacgtgtgtccgatgcagactcgcggttctctaagttcacggccccacacggtttctctgtggtcctcatccttccctgcatctgtggctgtccacagccaactgggtgaaagtttggatccccctctcacaccctagggtcagtggcaggcttccagcactgtagacctgagggttctctcctccccaagctcccgctccttcccacctccgtgctgcccgcccccaaccccgccaggctagcatctcagcgtggtcagggtcctgtccaccctcccaaagccaccatcccaggatgaggggcttctggagggtgacgggggaaggcacaagtcctggctgggaaatgcggtggaagggggcaggggttctgtgggttcgggactcccagactcttggctcaggcccgccaagtaggagaaagttcagagctgggaaggcgaacagctggcattcatggaagccacactggtggtttggccgcgtgcccatccttactggatgggaggaaagtaggggaaaggggagatgcctgaggggccggaaagcgtcttcctggtcactctgggcccgcccccacccccaccgtgcagactcatttcgacctttcccctacttttccggctgggctgggggcggttcctcccagtctggagcgtctgagcctccagacgtgctcaacgccatcctcccctcctccctccctctttctttcctcaaccctgcctcctctccctctaggagctgggaccccaggcagagcctctgagatgctcctgctcagcacagttcttcccgttctggacctgctgcctcattcattcattcattcattcatttgtcaagactgttttgtttgctttttgagacggagtctcgctctgttgtccaggctggagtgcagtggcgcaatctcagctcactgcaacctctgcctcccactgggttcaagtgattctcctgcctcagcctctcaagtagatgggattataggcgcctaccgccaccacgcccagctaatttttattcatttatcaagtcttttttttttttgagacagagtctcactctgtcacccaggttggagtgcaatggttcaacctcagctgactgcaacctctgcctcccgggttcaagtgattctcctgcctctgcctcctaaggagctgggattactggcgtccaccatcacacccagctaatctttgtatgttttactagagatggggtttggccatgttgaccaggctggtctcaaactcctgaccgatccgcccgcctcccaaagtgctggattacaggcatgaaccactgcgcccggcccattcctcaagtctttattgagcagctgctatgcgctggggcctgcgtggatgctggtgccaggctgtgggcagagctgctccttgtccccagcctcatggagcctccattgagtcagaggagagaccattagatgacctcagtgtccaggagtgggaagtccttgctcaattcccatttggggtgttctggcctggtctgggggtgaggcaaggcagggtgtccttccagaagctgggacccagagagagaagtgaggaaagagagtcccgccgggcgcagtggttcacacctgtaatcccagcactttgggaggccaaggctggcggatcacgaggtcaggagatcgagaccagtctggccaacatggtgaaacccccgtctctacaaataatgcaaaaactagtcgggcgtggtggcacatgcctgtagtcccagctgctccggaggctgcggcagaattgcttgaacctgggaggcggaggttgcagtgagccaagattgcgccactgcactccagcctggcgacagagcgagactccgtatcaaaaaacaaaacaaaaaaagagagtcccaggcagggggaacagcatgtgcaaagtccctgtggcaggacggtgtgtggtacaagggtgggaagaaagcctgtgtgccagagagggtgtgggtacagcatggcaggaggaggatgggcacgggggctggtcctccaggtgccttgtggaccatgctgaggaaggacatagggagccatggaagaggttaggcagatggcagagaggtggtcatgagataagatttgccttttacttccctggtcatccactgttaagcccccagatatgcctggctcctgagaccccccccaggggctgccctcctgtttcaagtctccactttatctcccttcagggctgcccagggattgccaggagctgttccaggttggggagaggcagagtggactatttgaaatccagcctcaggggtctccgccatttttggtgaactgcaagatgacctcaggtagggtgtgttagtccaccaggggcccctctccccataggccctgttgtctttctttaaattgaaaacaaaacaaaacaaaaaaattaaaggcagggtcttgctatgttgcccaagctggtctttttttttttttttttttttgagatggagttttgctcttggagctggagtgcaatgccacgatctcagctcactgaaacctccgcctcccgggttcaagcaattctccagcgtcagcctccccagtagctgagactacaggtgcgagcaaccacacccagctaatttttgtatttttagtagagactgggtttcaccatgttggtctggctggtctcaaactcctgacctcaaatgatttgccgactttggcctcccaaaatgctgggattataggcattagccactgctcctggcctcttttctttaaaatgcagcccttgtctgggtgtagtggctcatatctgtaatcccgacactttgggaggcctatcatgaggatcacttgagcccagaagttcgagaccagcctggacaacatagtgagagctcatctttacaaaaaattttgtaaaagtaaaaaaaaaggccaagtgcagtggctcacacctgtaatcccagcactttgggaggttgaggcagacagatcacgaggtcaggagttcgagaccagcctgaccaacatggtgaaaccccgtctctactaaaaatacaaaaattagccgggcatggtggtgtgcacctgtaatcccagctactcaggtggctgaggcaggagaatctcttgaacctgggaggcagaggttgcagtgagctgagatgacgccaccgcactccagcctgggcgacagagcgagactccgtccccccatcaaaaaaataaaaaagagaaaataaaataaaataaaataaaattcagcccttgctgggcatggtggcacatgcctgtagtcccagctactcgggaggccaaggcaggagggtcacttcagcccaggagttaaaggctgccgtgagccgtgatcacacctgtgaatagccaccgcactccaacctgggcaacacaacaaaacctcgtttctaaaaaaaaacaaaggctgagcacggtggcttacacctgaaatgccagcactttgggaggctgaggcgggcaaatcacttgaggtcagaagttcaagaccagcctggccaacatggtgaaaccctatctctaccaacataaacattagccgggcgtgcctgtgattccagctgcttgtggggctgaagcacaagaatcgcttgagccccgaaggcagaggttgcagtgagctgagattgcggcactgcgatccagcctgggcaacagagtgagactccatctctaaaaaaaaaaaaaaaaaaaaagaaagcttttttttccactgagaagtcctttccattacaagaggttacaacacggggttttacccagttcagctggcccagagaggctttgcagatttccactgcctactccctcccacactcagtccctgctgggttcttgggacaaagatcttcccaaggccagcccataatattcctccctctgacccaccctcctcgagtcctccagggatgagtgagggagctgctgtcttcctgggtttggagggggtttggtgcttggcagccagatgagggagtggggtcgtctgtgaagagggacttcctggtgaccttgtacctttctgggcagatggaggctggacagtaattcagaggcgccacgatggctcagtggacttcaaccggccctgggaagcctacaaggcggggtttggggatccccacggtaggtgtttctagtggggacagaggcaggggaggaagagggaccctcagaagtggccctgcctcatggagtggcctctcccactccaggcgagttctggctgggtctggagaaggtgcatagcatcacgggggaccgcaacagccgcctggccgtgcagctgcgggactgggatggcaacgccgagttgctgcagttctccgtgcacctgggtggcgaggacacggcctatagcctgcagctcactgcacccgtggccggccagctgggcgccaccaccgtcccacccagcggcctctccgtacccttctccacttgggaccaggatcacgacctccgcagggacaagaactgcgccaagagcctctctggtgagcaggccctgccatgccacacccagccagcagcttccctccttatctttctgctgctctgtcctgccttcaaccccacattgcatctgtttcctgcccccacctcttccttacatgccgtgtgtgtgattgggccactaacttagcctatctggcctcagttttcccatcctgaaaagggtcttgaccgtctttacttttatttacttatgtgtttgtttatttatttatttatgtatttattttttgagacggagtctcactttgtcacccaggctggagtgctttgtggcacgatcttggctcactgcaagctccacctcctgagttcacaccattctcctgcctcagcctcccgagtagctgggactataggtgcccaccaccacgcctggctaatttttttgtatttttagtagagatggggtttcaccgtgttagccaggatggtctcgatctcctgacctcgtgatctgcctgcctcagcctcccaaagtgctgggattacaggcgtgagccaccgcgcccggcctacttatttattttttgagacagagtcccgctgtgtctcccaggctggagtgcaagtgacgtgatcttggctcactgcagcctccgcctcctgggttcaagtgattctcctgcctcagcctcctgagtagctgggattacaggttcccgccaccatgcacagataattgttttgtatttttagtagagacggggtttcaccatgttggccagggtggtcttgaactcctgacctcaagtgatctgcccacctcggcctcccaaagtgttgggattacaggcgtgagccacaatacccggccacaaacatctttataatggtgctccacaggattctttttttttttttttttttgaaacagggtctcactctgttgcctaagctggagtgcagtggtgcgatctcggctcactgcaacctccacctcccgggttcaagcaattctcaaaaaaaaaaaaaaattaggcacggtggctcacacttgcaatcccagcactttgggaggctgaagcgagtggatcacttgagcccaggagaccaatctgagcaacagggcgaaatcctgtctcaattaaaaatacaaaaaactagctgggcatggtggtgcctgcctgtgttcccatctacttgggaggctgagttgggaggatctcttgagcctaggagataaggctgcagtgagctgagactgcgccactgcactcaagcctgggtgacagagtgagacccctgcctcaaaagaaaaagaaaaaatgcaggcatggtggctcacacctgtggtcccagctacttgggaggcccaggtacaagaatcacttgagcccgtaaggttgacgctgcattgagccatcaccacaccactgcactccagcctgggcaatggagccaggccctgtctcaaaaaaaattgtttttaaacttaaaaataaggccgggtgtgggggctcacacctgtaatcccagcactttgggaggccgaggtgggtggatcacctgaggtcaggagttcaaaactagcctggccaacatggtgaaaccctgtctctactaaaaatacaaaaattaggccaggcgcagtgggtcatacctgtaatcccagcactttgggaggctgaggagggtggatcacatgaggtaaggagtttgagaccaacctggccaacatggtgaaaccccctcactactaaaaatacaaaaactagccaggcgtggtggcgggtgcctgtaatcccggctactcaggaggctgaggcatgagaatcccttgaacctgggaggcagaggtgcagtgagccgagattgtgccactgcactccagcctgggagatagagtgagactcagtctcaaaaaaaaagaccaaaaattagccaggtgtggtggcaggcgcctgtaatcccagctactcgggaggctgagggaggagaatcacttaaacctgagagacggaggttgcagtgagctgagatcgcaccactgcactccagcctgggtgacagagtaagactcaatctcaaaaaaaaaaaagtcaagtccaaagcccagcctggtccccaacctgcctcatcctcaaccctatccctatctcctttcagccccatcggtggctcaaagacctgaccatgttccctctcccctgaccccggcaggaggctggtggtttggcacctgcagccattccaacctcaacggccagtacttccgctccatcccacagcagcggcagaagcttaagaagggaatcttctggaagacctggcggggccgctactacccgctgcaggccaccaccatgttgatccagcccatggcagcagaggcagcctcctagcgtcctggctgggcctggtcccaggcccacgaaagacggtgactcttggctctgcccgaggatgtggccgttccctgcctgggcaggggctccaaggaggggccatctggaaacttgtggacagagaagaagaccacgactggagaagccccctttctgagtgcaggggggctgcatgcgttgcctcctgagatcgaggctgcaggatatgctcagactctagaggcgtggaccaaggggcatggagcttcactccttgctggccagggagttggggactcagagggaccacttggggccagccagactggcctcaatggcggactcagtcacattgactgacggggaccagggcttgtgtgggtcgagagcgccctcatggtgctggtgctgttgtgtgtaggtcccctggggacacaagcaggcgccaatggtatctgggcggagctcacagagttcttggaataaaagcaacctcagaacactttgttctttgttcttgtttgttttctttcttttttttctctttctttagttcacagatctagtaagttaccctcagtttgttttaaaaagtgaacaaagtccatgtaaacatgttcccagggccaggcacggtgtctcgtgcctgtaatcccagccatttgtgaggccgagacaggcaggtcacttgaggtcagcagttcgagaccagccgggccaacatggtggaacccccatctctacaaaaaaatacaaaaattagccgagcatggtggtgcacgtctgtagtcccagctactctagaggctgacgcagaagaatcacttgagccaaggaggcagaggctgcaaataagccgagattgcgccactgcactccagcctgggcaacagagcaagactccatctcaaaacaaaaataatttttttttcgtagaggcagggtctcattctattgtccaggctggtctcaaacaccgagactcaagggatcctcctgccttggcttcacaaagtgatgggattaaaggtgtgagcgccactgcacccacccctgaaggctctaattctacatctgtgttttgttaaaaaaaaaaaaaaaagatggcgtggtcgctcatgcctgtaatcccagcactttaggaggccgaggcaggtggatcatctgacattacgagttccaggcccgcctgaccaacatggtgaaaccccgtctctactaaaaatacaaaaattagccgggtgtggtggcgggtgcctgtaatcccagctactcaggaggctgaggcaggagaatcacttgaactcgggaggtggaggttgcggtgagcagagatcatgccactgcactccagcctgggtgacagagcaagacttgatttcaaaaaaaaaaaaaaaaaaaaaaagaatagggctgggcgcattggctcacacttgtaacactagcactttgggaggccaacgagcggatcacccgaggtcgggtgatcccgctgtattgctctatatagtgagatccctatatagggtctcactctattgtccaggctggtctggcctggccaatgtggtgaaacctcatttctactaaaaatacaaaaattagctgggcatagtgatgcgcacctataatcccagctactcaggaggctgaggccggagaattgcttgaacccaggaggtggaggttgcagtgagccgagatggcgctgagaggtgacagcgtgctggcagtcctcacagccctcgctcactctctgcgactcctctgcctgggctcccactgtggcggcacttcaggagcccttcagcccaccgctgcactgtgggagcccctttctgggctggccaaggccggagctggctccctcagcttgcagggaagtgtggagggagaggcgcgagccggaatcggggctgcgcgcggtgcttgtgggccagctggagttccgggtgggcgtgggcttggcggaccctgcactcagagcagccgtccggccctgctggccccgggcaatgaggggcttagcacccgggccggacagcggctgcggagggtgtactgggtcccccagcagtgccagcgcaccggcgctgcgcttgatttctcaccaggccttagctgccttcccgcggggcagggatcgggacctgcagcccgccatgcctgagcctcccaccccctccatgggctcctgtgcggcccgcgcctccctgacgagcactgccccatgctccatggtgcccagtcccatccaccacccaagggctgaggagtgcaggcgcacggcgtgggactggcaggcagctccacctgcagccccggtgcaggatccactgggtgaagctagctgggctcctgagtctggtggggacgtggagaacctttgtctagctcagggattgtaaatacaccaatcatcaccctatgtctagctcagggtttgtgaatgcaccaatgaacactctgtatctagctactctggtggggccttggagaacctttatgtctagctcagggattgtaaatacaccaatcggcactctgtatctagctcaaggtttgtaaacacaccaatcagcaccctgtgtctagctcagggtttgtgaatgcaccaatcgacactctgtatctagctactgtggtggggccttggagaacctttgtgttgacactctgtatctagttaatctggtggggatgtggagaacctttgtgtctagctcaggaattgtaaacgcaccaatcagcgccctgtcaaaacagaccagtgggctctaccaatcagcaggatgtgggtggggccagataagagaataaaagcaggctgcccgagccagcagtggcaacccacttgggtccccttccacactgtggaagctttgttcttttgctctttgcaataaatcttgtactgctcactctttgggtccccactgcttttatgagctgtaacactcactgcgaaggtctgcagcttcactcctgagccagtgaaaccatgaacccaccagaaggaagaaacgctgaacacacctgaacatcagaagaaacaaactccagacgcgccaccttaagagctggaacacttaccgcaagggtccatggcttcattcttgaagtcagtgagaccaagaaccccccaattccggatacagtgccactgcactccagcccaggcaacagagcgagattctgtctaaaaaataaataaataaatatgaaataaaataaaaattgtaataattggataccctacatctaggacatgtatttgaggaaaaccacatctgtccattttctgaaccccagctgctgttaattttttttttttttttttccgagacaagagtctcactctgtcacccaggctggagcgcggtagtgcgatctcagcttactgcaacctccacctcccgggttcaagcgattctcctgcctcggcctcccgagtagctgagattacaggcgcctcccactgcacccagctaatttttgtatttttagtatagatgggtttggccaggctggtctcaaactcctgacctcaagtgatctgcccgcctcggcctccgaaactggtgggattacaggcgcaagccactgtgcccggcctgttaatttatttttgccccagtatctccctccaaatattccttatagatgtctcttggggaggtggtgggggttcttgcgctagaagaaaaaatatctgtgatttccttgtcttgacccttcctggcaggtgctggggacacagctgtttccctggggctgtggctgggtataggtgacaaactttttagctttgtagaggtaggtcctacagctgccaggccagggaggctagaggctgccctctccaggttccttgtttgcctgtgtcctgtactgagcaggcttagaggatctcctctgagcccactgtcactggagctggtggtgagtccagtctgcaggagagggggttcctctagccacaccctcttcatttccaggctctgccaatgatgggctcatctcttcaatgtcatcctttttcctgcagccaccttgacctcaaagcatttcctgcccctccaacctggggaacgacagaaaaaaaaaaaaaaaaaccaccacctgggcacggtggcgcactcctacactccccgcactctgggaggctgaggtgggtagatcacaaggtcaggagatcaagaccatactggctgacacggtgaaaccccgtctctactaaaaatacaaaaaattagccaggcatggtggcacatgcccgtagtcccagctattcgggaggctaaggcaggagaatcacttgaacctgggaggcggaggttgcagtgagctgagattgcaccactgcactccagcctgggtgacagagcaagactctgtctcaaaaaagaaagaaaaaaagaaagaaaagaaaaacaccatggcaggaaactaacaaggggccaggaagctgggatgtgaacctggacctgttaaactccagagctgcagctgtaaatcacatccctctcctggaccacaggagctcactggccccagttcctgcatttggaaaatggggatggttttgacaccccacccctccatgccaccatcccttcctggcctcatggtgtggggagggggtggtaaagaattaataaggcattaatattcatcacaggctgggtccagtgcctcgcgactgtaatcccagctctttgggaggctgaggctggaggaccttggagtttgagaccagcctacgcaacacagcaagacctcatctctacgataaatttttaaaaagtccgggtgcagtggctcatgcctataatcccagcactttgggaggccaaggcgggtggatcatgaggttaggagttcaagaccagcctggccaagatagtgaaaccccatctctactaaaaatacaaaaaaattagccaggtgtggtggtgggcgcctgtaatcccagctacttgagaggctaaggcagagaattgcttggactcgggaggcagagggtgcagtgagccgagatcatgccactgcactccagcctgggcaacagagtgagaccctgcctcaaaaaaaaaaaaaaagaatcaagagaaatttcagagggaggagagacagaataaggcaactgaggatgatagagggagggaggcagagaggagaagatgagacagaagtccatgtcctctgggtttgatgggagggagggaaggaaggatggagacacaagagggggagtggatatggggaaggagtcaaatttgtttatgggattgagaggtgaagccggctaggcttctgggtcgggtggggacttgaacttttctgtctagctaaaggattgtaaacgtaccaatcagcactctgtgtctagctaaaggattgtaaatgcaccaatcagcactctgtgtctagctaaaggtttgtaaatgcaccaatcagcgctctgtgtctagctaatcaggtaggggacttggagaattttctgtctagctaaaggattgtaaatgcaccaatcagcactttgtgtctagctaaagttttgtaaatgcaccaatcagcactctgtcaaaatggacaaatcagcactctaaaacggaacaatcagcactctgtaaaatggaccaatcagctctctgtaaaatagaccaatcagcaggatgtgggtggggccaaataagggaataaaaggccacccgagccagcagcagcaacccactcaggttcccttccacgctgtagaagctctgttctttcactcttcgcaataaatcttgctgctgctcactctttgggtccgcaccacctttatgagctgtaacactcaccgcaaagatctgcagcttcactcctgaagtcagcgagaccacgaacctaccagaaggaataaactccagacacatccaaacatcagaaggaacaaactccagacacaccatctttaagaactgtaacactcaccgtgagggtccacagcttcattcttgaagtcagtgagaccaagaacccaccaatactggacacattttggcgaccacgaagggactatcgcctatcaccaagcggtgagactatcgcctatcaccaagcggtgagtaccatcggacccctttcgcttgctattcgtcctatttttccttagaatttgggggctaaataccgggcacctgtcggccagttaaaagcgactagcgcaggtgctggactaaagacatgggtgtgaggctttctgggaaggggctctctaacaaaccccgactttttggagttgggagcgttagtttgcctggaaccagcttccgcttttcctgtacttctgggctgagtcgagggttgacaggaaagccattcagctctggggtcttgacaacaagttggttgatcctgtggccatgagcagaactctcaaagtcatgtcgcccaagtgagactcgcccatctatcctatctgtcctgacccttgcctcctgggtcctaatgcctgtcagacaaacttcctctcgcctctcttctccgaggctagtcccacctctaaaaaccactccctgtctctggtgcttttctagtttctcctataagaatgacttctagtataaacttcaggactctgttaccttctttaggcacctaggctcactaatcagaaagacataatttttgcccaaagccctgttgtaggggggctatctggaattttaggatccctcctcagacaagcaggactaataaaagctattcctgaagctaggatatggggagcctcagaaattgtattcttcctattcatataagtgaggacaaaaggtgtcactcttccaaccctggagatcccttccttccctcatggtatggccctccacttcatttttggggcataacatcattgtaggaaattggtaaggtcccaatactaaaaggagaatgcttaggactgtaacaggttttcgagaatgtgttggtaagggccactaaatccaatttttctcggtcatctttgtggtctaggaggacaggcaagggtgcaggttttttgagaatgcgttggtaagggccactaaatccgaccttcctcggttctccttgtggtctgggaggaaagctactgtttctgctgctgcgttggtgagtgcaactattccaatcagcagggtctagtgaccattacgggttcttgggcaggggttgtttctgctgctgcatcagtgagcgcaactattccgatcagcagggcccaaggaccattgtggattcttgggcagggggagaagaaaaacacaccaaaatcgtgggtggttttgtctttcagatgggaaacaggcatcaacaggctcacccttgaaatgcatcctaggccattgggaccagtctgacctgcaaaccctgaaaaagaggcagctcatttttttctgcactgtggcctggccccaatattctctctctgatggggaaaaatggccatctgagggaagtacaaattacaatactatcctgcagcttgaccttttctgtaagagaaaggcaaatggagtgaaatagttatgtccaagctttcctttcattaaaggagaatacacatctatgcaaaggttgcaatttacatcccacaggagaacctttcagcttacccccatatcctagcctccctacagctccccttcgtattagtgacaagcctcctctaatctcccctgcccagaaggaaataagcaaagaaatctccaaaggaccacaaaactcccctgggctgtcggttatgtccccttcaaattgtagcgggaggggaatttggcctaacatgggtacatgtctacttctccctctctgatttaaagcagatcaaggcacacctggggaagttttcagatgatcctgataggtacatagatgtcctacagggtctagggcaaatcttcaatctcacttggagagatgtcatgctattgttagatcaaaccctggcctttaatgaaaataatgcagctttagctgcagcccaagactttggaggtacctggtatcttagttaagtaaatgatagaatgacagctgaagaaagggacaaattccctactggtcagcaagccatccccagtatggatccccactgggacttcaattcagatcatggggactggagtcataaacatctgttgacctatgttctagaaggactaaggataattaggaagaagcccatgaattattcactgatgtccaccataactcagggaaaggaagaaaatccttctgccttcctcgagtggctacagaaggccttaagaaaatatactcccctgtcacccaaatcactcaagggtcaattgatcctaaaagataagtttattatccaatcagccacagatatcaggagaaagctccaaaagtgagccctgtgccctgaacaaaatctagaggcattattaaacctggcaacctcactgttctataacagggaccaagaggaacaggcccaaaaggaaaagtgagatcagagaaaggccgcagacttagtcatggccctcagacaaacaaaccttggtggttcagagaggacagaaaatggagcaggccaatcatccagtatggcttgttagcagtgtggtttgcaaggacactttaaaaaagattgtccaatgagaaacaagctgcccccttgtccatgtcccctatgccaaggcaatcactggaaggcacactgccccagaggacaaagcttctctgggacagaagcccccaaccagatgatccaacaacaggactgagggtgcctggggcaagtgtcagctcatgtcatcactctcactgagccccaggtaactttaaccattgacagccaggaaattgacttcctcctggacactggtgcggctttctcagtgttaatttcctgtcctgaacagctgtcctccaggtccgttaccatctgaggaatcctgggacagcctgtaaccaggtatttctcccacctcctcagttgtaattgggagactttgctcttttcacatgcctttcttgttatgcctgaaagtcccacacccttattagggagggatatattagccaaagctggagctattatctacatgaatatggggaacaagtttcccatttgttgtcccctacttgaggatgaaatcaagcctgaagtctgggcattggaaggacaatttggaagggcaaaaaatgcccacccagtccaaatcagggtaaaagatcccaccacatttccttatcaaaggcaatattccttaaagcctgaagcttataaaggattacaggatattgttaaacatttaaaagctcaaggcttagtaaggaaatgcagcagtccctgcaacaccccaattctaggagtacaaaaaccaaatggtcaatggagactagtgcaagatcttagactcatcgatgaggcaataatttttctatatccagttgtatccaacccctataccctgctctctcaaataccagaggaagcagaatggttcactgttctggacctcaaggatgccttcttctgtattcccctgcactctgactctcagtttctctttgcctttgaggatcccacagaccacacgtcccaacttacgtggatggtcttgccccaagggtttagggatagccctcatctgtttggtcaggcactggctcaagatctaggccacttctcaaatccaggtgctctggtccttcagtatgtggatgatttacttttggctactagttcagaagcctcatgccagcaggctactctagatctcttgaactttctagctaatcaagggtacaaggcatctaggtcgaaggcccagctttgcctacagcaggtcaaatatctaggcctaatcttagccagaggaatcagggccctcagcaaggaacaaatacagcctatactggcttatcctcaccctaagacatttaacagttgcaggggttccttgaaatcaccagcttttgctgattgtggatccccagatacagcgagatagccaggcccctctatactctaatcaaggagacccagagggcaaatactcatctagtagaatgggaaccaggggcagaaacagccttcaaaaccttaaagcaggccctagtacaagctccagctttaagccttcccacaggacaaaacatcacagagagagcagggatagctcttggagtccttactcagactcatgggataaccccacaaccagtggcatacctaagtaaggaaactgatgtagtagcaaatggctggcctcattgcttatgggtagttgcagcagtggctgtcttagtgtcagaggctatcaaaataatacaaggaaaggatctcactgtctggactactcatgatgtaaatggcaacctaggtgctaaagaaagtttatggctatcagacaatcgcctacttagataccaggcactattccttgaggggctggtgcttcaaatatgcacatgtgtggccctcaaccctgccacttttctcccagagtatgaggaaccaattgagcatgactgccaacaaattatagcccagaattatgctgcccaagaggatctcttagaagtccccttagctaatcttgaccttaacctatatactgatggaagttcatttgtggagaatgggatatgaagggcaggttatgccatagttagtgatgtaactgtacttgaaagtaagcctcttcccccagggaccagcgcccagttagcagaactagtggcacttacctgagccttagaactgggaaacggaaaaagaataaatgtgtatacatatagcaagtatgcttacctaatcctacatgcccatgccgcaatatggaaagaaagggagtttctaacctctgggggaacccccattaaataccacaaggaaaccatggagttattgcacacagtgcaaaaacccaaggaggtggcagtcttacacagccgaagccatcaaaaatgggaagaagaggggagaacagcagcataagtggctagcagaggcagggaaagaccagcagaaaggaaagagagaaagagacaggaagtcagagaaagagagaagagaggaagaaacagagagacaaagagaaggagacagagaggaagagacagagacaaagaagaagtcaaagagaaaaggagatagaagtagtaaaaaaaaaaaagtgtaccctagcgtaaatttaaaacctataattgataattgaaggtcttctctgtaaccttataacactccaataccaccttgttgtcagtgtaaacaagggcatagccggaaagcactgaggccactgacaacctgtagccttcctatcaaaaatccttaacccagcaggtttcctaacaggagatctaaatcttaattaattaccatacaaaggtctgaccagatctaggaggaactcccttcaggacaggatgatagatggttcctcccaggcgattaagggaaaaagacacaatgggtattcagtaagtgataaggaaactcttgtagatgcagagttaggaaaattgcctaataattggtctgctcaaacatgccagttgtttccactcagccaaatcttaaagtacttacagaatcaggaagcagccatctataccaattctaagttaatatggactgaacaaggtcttactaatagcaaagaataattgaaatcccaaacttacaaggttttcaacaaaagtaaagtttgctaaaaaagttaacagtgtaacatgtattatcctaacttctaatcttatggaaatcagaccgtatctgtgcccctcaaagctcaagtctatcagcgcagggccatacaactaatatccctacttatagggttaggaatggctactgctacaggaaccggaatagccagtttatccacttcattattctactaccatacaccttcaaaggatttctcagacagtttgtaagaaataacaaaatctatccttactctacaatcccaaatatactctttggcagcagcaactctccaaaaccactgaggcctagacctcctcactgctgagaaaggaggactctgcaccttcttaggggaagagtgttgtttttacactaaacagtcagggatagcacgagatgccacctggcatttacaggaaaaggcttctgaaatcagacaatgcctttcgaactctaataccaacctctggagttgggcaacatggcttctcccctaggtcctgtggcagccatcttgctcttactcacctttgggccctgcatttttaaccttcttgtcaaatttgtttcttctagaatcgaggccatcaagctacagatggtcttaaaaatggaaccccaaatgagttcaactaacaacttctactgaggacccctggaccgacccactggcccttccactggcctaaagagttcccctctggaggacactacaattgcagggccccttcttccagcaggaagtagctagagtggtcatcggccaaattcccaacagcagttggggtgttctgtttagaggggtgattgagaggtgaagccggctgggcttcttggttgagtagggacttggagaacttttctgtctagctaaaggattgcaaatgcaccaatcagcgctctgtgtctagctaaaggtttgtaaatgcaccaatcagcgctctgtgtctaactaatcgcgtaggggacttagagaactttcctgtctagctaaaggattgtaaatgcaccaatcagcactctgtgtctagctaaaggtttgtaaatgcaccaatcagcactctgtcaaaacggaccaatcagcactctgtaaaacggaccaatcagcactctgtaaagtggaccaatcagctctctgtaaaatggaccaatcagcaggatgtaggtggggccaaataagggaataaaagcaggacaccgcagccagcagcggcaacgtgcttgggtccccttccatgctgtggaaactttgttctttcactcttcccagtaaatcctgctgctgctcactctttgggtgcgcactgcctttatgagctgtaacactcaccgcaaaggtctgcagtttcactcctgaagtcagcgagaccaaaagcccaccagaagcaagaaactctagacatgtctgaatatcagaaggaacaaactctggacacaccatctttcagaaccgtaacactcaccggagggtctgtggcttcattcttggagtcagcaagaccaagaacccaccaatctggacacaggatgtgttatacaaaacttataggaggctattactttggactgacttcctacaccaggcccaacaaactaaaccaaaatggagtcactcatgctaaagttttacgtgatcaaaaagaaactaagttgtttatctgaccttctacaaaatcaggagagagagagatgggatagccaagtctcccaccaggtcagttttagccatcatgataaggatgtcctctctgctttaacctttacaagaaaagtaactttgggctgagtgcggtggtggctcatgcctgtaatcccagcactttgggaggccaaggcaggaggattgcttgagttcaggagttcaaatccagcctggccaacaaggcaagaccctgtctctggaaaaaaaaaattagctgggcatggtggcacacacctgtgatcctagctcctcaggaggctgaggtgggaagattgcttgatcccaggaagttgaggttgcagtgagctatgatcgcaccactgcactccagcctgggtgacagagcaagactcagactccaaaaggaaactttaaaatgaccaatccaagttttcttttctttttttctttttttttgagtcggagttttgctctgctctcccaggctggagtgcaatggtgtgatcttcgctcactgcaacctccgcctccctggttcaagtgattctcctgcctcaacctcctgagtagctgggattacaggcacctgccaccgcgcccggctaatatttttgtattgttagtagagatagggtttcatcatcattatcatgttggtcaagctggtctcgaactcctgacctcgggtgatctgcctgcctcggcctccaaagtgctgggattacaggcatgagccactgcacctgacctccacgttttattttctgtttgtgctttacttggccctttttctgcctgtaaaaccaacctacctgctcagctcatgggaaaattagtttcattttgtgaaatgaagtgttgcccgattgtagaattgcaaataaaatcaattaagatctttaaactaaatgtgttgtaattttgtttttttgacagatgcccaatgaacaccctgggaatgagatccaagaggcgataatggcatctgctctaataactagtacattgactctaggcttagattattcaccactgaataaataaacgtatttattcagcagtggggaacttacagcaatgatggggacagatacagtccctgatgtcatcaggctgatatgctgctgacagaggacaaaaaacaaacagatcaatgggtcaggaaagcaaggcttttttttttttgagacagggtcttgctctgttacccaagctggagtgcagtggggtgatcatggctcactgcagcctcgatttcccaggctcgaatgatcctcccgccttggcctcccaagtatctgggaccctggcatgatgcaccacatctggctaatttttgttgttgttcttttcttttttttccttttctcttttttttcctttttttctttttttttttttttttttgagagactgggttttgacatgttgcctaggctggtctctagctcctggcctcaagtgatcctcccacctcagcctcctcaaagggcatgtttttaggcataagccaccgcagccagccaaaacaaacaaacaaaaagtaacgtatactttgtgttaataattttgcatagtatattgaaaatttgccaagaaagtacattttagatactctcactacacacacagttaattatggaaggcaatggataggttaattgcttaactctcataattggccatgtgtggtgaaaatgcctgtaatcccagcactttgggaggccaaggtgggcgaatcacctgaggtcaggagttcgagatcagcctgaccaacatggagaaaccccgtctctactaaaaatacaaaaaaattagccaagcatggtggtgcatgcctgtaatcccagctattcgggaggctgaggcatgagaatcgcttgaacccgggaggcagaggctgcagtgagccgagagcacaccattgcacttcagcctgggcaacgacagcaaaactccgtctcaaaaaaaaaaaaaaaaactgtcataattattatttcactgggtacatgtgtatcaaaacacacgctgtacaccctaaatatataaaacaaacacatactgtattgtcaggtagtgataaatcctatcactacctgacaatacagcagtatgtgttttattttctatattacctatttttatattttacctatgtggcaaaatataggacaaaagaggggtagtggtaggaggtcctgttggagagcattggtatccagtaaggatttaaaagtatttatttaacaaagaatagcagaaagtggacggttgattcacacttggtgcaatctcggctcactgcaacctccacctcccaggttcaagcgattctcctgcctcaacctcctgagtagctgggtttacaggcaccagcgaccacgcccgactaatttttgtatttttagtagaaacggggtttcaccatgttggtcaggctggtctcgaactcctgacctcgtgatccgccagcctcggcctcccaaagtcctggaattacaggcgtgagccaccgcgcctggctgatctggttattttcaaaagattccatgagacgggtttcttcagtttacagaggaggaaactgaggcacagaaggataacccagtgagtcccaatatagagatggagactgcaaccgagaaaggggacccagcgctgaggtccccggaaatggtcatttatgggcttggggggcgaccagggcagcgcgcgctgacctatgacgtcatcgggacgttaagcatcgtagcattacctggacgtagccccatttctcttcccggacaggtcctctgatagtcgggtaggttctcaatcaagcctctcattagttatttggtctgtcaatccatttcattcctgcagtcttccgccccgccctcttgagctcgcccctgataggctggcgcgtccgtcacttcaaaaaggtccgcattccttccgcctttctccaggacaccgagggcgaggagggtggtaccaagcggcgcccaccctcagagcactacttccatctctgattggcttcgctgggtgcccgtcgctactccactcgccgctgataggccattcaaccgccgctctgcgcggcgccggctccgcccccgtcgggtgtttgtggtggggctgcggagtcgccgatcccgccggaagcgccaggacaatggggacccgggacgacgagtacgactacctattcaaaggtgcggccggtggggcacagacgggcgaagtcgtggcggcgaggcggcgggcagacgggccaaggccgcgctccaggccgctgggcccaggccggagcccggggcttggggcccggcgggtcaggcagccgggaaggccggagccgaccgggcagcatcagcttcgggctaggatgcgcggctatacggagccggaggcccggagagacctgggggacctaggacgcgccggggcggggccagagcctagagggggtggggcccggagcggtgggagaggctgttagggcggggcctccgcagggggtggagctttcccaagatttggcgggccgggctgggctgaaagcgtgattcgggatgggggcggggtttttaggggcggggctaaggcgtgatgggcgtgaccaataggtgggttgggcctgggcaaacggaggcggggctctcacgaggcttgtcctgattggggcagcgtgtttgggggtggggcccgggagaggcggggcaggcaatgggggctgggccgagatgagggcctgggggtgaggtgtgtggtggtgggagccttggattggggtgcaaagctgggattgagtggaaaggcacccgtgtgtgcagcaagaattccatctcttcactcagaactctcaacagtgctaagccagtacttgcacttttctgagcactttacccgaattaactaaaatcctcactgcagccctttgaggttgatactaaccagcctctctttttacacgttgggaaactgaggcccagagtgacaaagacacagtttataagtgttggaacccgattgagcccaggccacctgtaggccttaccacttaggaagcgtgtcttagggggcttgtggccagcatctgggactttgggttgttggaccaacttcttccaacacgtgcgcactgatggccggggccccagccagcctgctggagggtcttccccgcccgagggactgagggggctctaggagcatcacataaggcctaggtagatcaggcagccattgcccatttagggacagctggaggaagccggagtcccttgtttctcagctgagccttctgtgcccagctacactttggcctagtggtctgccctggttgctgggctccctggctgacaatggcagcccttgagggctaacccctggatccaaggtgccttcaccctgcggcctgctctatgagggcctgcgtcgcacatcagctgttggtatcctcacctcgctgagccgttcctccgagtgtgctctgtggcttgcaccaggcctagctgggccttgtgtctggtctcatccagcgtcttctgattgtggggaatgaggcagaggtctccccacctgggctgtccgtgtggcgaaagccttccggggggagggagaggaagtgcctctacaagggcctagagtcgtcctgtggcactgagggctctggcagctgcacacaggttgataatgtcactggtgggtgaggctctgtggtcagcaggtgcccggcccaaggtctcgcccctcgtggcaggaggaagctttggaagggttttggagactgggattctaaggggccgtctggagacagggggactaaactttgggtcctgctgatcgggtgccatctccactcagcccaccgtgaggcagctgctcccaggtcctggctgggcacccacccagacgtggcactgccagggcaggggtgttgctccccacatgccccatccaggtttctgtggttatcccctgcttgttatttttgcccttttgctgtgttaaatgacccagctccgagtgcttgctcaagtcatggttttgccctttagattatttccttgaagtgcgttcccagcagaacagttactgggtcaggagcaatggagaggctgtgtggttcccgggacttgtctgcagagactgcttcctggaaacactgatttagcttctgcggcatctggcatttggcgggcaggcggtgtggggtgggggggggcggtgcctgccctgctgccctccccacactggcctccttttactgagtctagcaggtgccctgctgaccttctcaagctagttggtagcaaaaatctaacccacaagttcagcttttcccaaactggtcatctgccgtctcaccttcacagctgtgcctcatcagaggacctcctctattctctttcaatatttttcttttcctttttcttttcttttttttttttttttttttttgagacagaattttactctagtcacccagcctggagtgcagtggcgcaatctcggctcactgcagcctccgtctcccgggttcaaacgattctcctgcctcagcctcccgagtagctgggattacaagcacccaccacacccggctaatttttgtattttagtagatacggggtttcaccatgttggccagctgatcttgaactcctgacctcaggtgatccacctgtctcggcctcccaaagtgctgggattacaggcatgagccaccgtgcctggcctctgcatttttttttttttttttggtggccacatcacgcactggctcccttgacttcagcggccaaggccagcagatcccccgggtgatgccccgtgtgccatttgttttccttcgtgaatgttctttccttcccccaggaatgacactgttgatttgtacctaattatagagcctcacatttatcctcctaacattttctcctttagccatgggccattttcatagcctgccactaattgccgtgggaccccagatttcttttctgatggactcggtactccatggttgcagctgtgtccccaagggccactgaggtcctctcagagcccttcccctaccctagaggccctggccaatcagggctcacctggccctggaggacatgggtcgtgggggaaacgggccgcagctgccccaggccctgtcctctgggtcttgtccacccctcccctgcccaaggacaaggtggcccctgtccccagggaaggggcctgcctggtgcttccctttctgtgctgaggctcctgaggcagctcccagccctcaagcctgggcagacctcacagtgggcctgctgttccagttgctgtttggggacccaaacataccatcttccccatttagaatgggggtccctccagtgccctggctctgtacacctccccatagaagagctgagacaagagtggcccccagtgccggtccctggggcctaggatgcttaggaccagcttccaggggagggatgggggcactgcttggctccgccaggctctgccggaatgggggcaccattcccctgaagagtctctcagtctgcctgagcattagggtctgggcccccagggccaccacactgtcatggggcaggccagggcacctaggacttctcagaggtgccagttctttgtttttgccaaccgggcttgcctgctctgtcagccaagtggcgtgtctggggtaggggggtcgcttcccagccagtgaagccaccaacttctgtggaaatgctcggagctgtgtcctcaagggctctttatttccccaagacaacagattgcttgtgtcctagacaatgaagttttcatccccagcctgcatcctggaccagcccgccactgccccgctggccacctctctgcatcgggcacccagtgccagggactggttgggcagctcagcctctttgccattcacctgttttgtcacccagactggagtgcagtggcttagtgtcagctcactgcaacctccgcctcctgggttcaaatgattctcctgcctcagcctcctgagtagctgggattacaggtgcctaccaccatgcccacctattttttgtatttttagtagagacggggtttcgccatgttgacaggctggtctcgaactcctgagctcaagtgatccacccgccttggcctcccaaagtgctgggattacaggcgtgagccactgcacctggcctgtcattgatctgttcagtggccatttggcctttgctctgacttggtcactctgggttgagtgtccccagctgttcagggagaatgataatatttacatctgtccctggggcagccctgagaatgtggacagctgaggcctgcaaagcactggggacccagcctggccaaagtgcttgagggcaaaactgatggggctgggtgccatggctcacgcctggaatcctagtactttggaaggccgaggtgggtgaatcacttgaagtcaggagtttgagacagcctggccaacatggcaaaaccccacctctactaaaaatacaaaaattatctgggcgtcgtggtgcacgcctataatcccggctactcgggaggctgaggcaggaggatctcttgaactcaggaggcggagagtacagtgagctgagattgtgtcagtgcactccagcctgggcgagggagattccatctcaatacaaacaaacaaaaacaaacaaactgatggggctgaggagccactaaggctgtacagctggggcaaggctggaatggtgtgaaggtgtcgggaatgcctgggcagggcccgagtttcctgtcttatttcctgaggacgtgagaactgagcagacctccctggccttggccaggctcccgtagctgccgtggaaaggaggttaaggttggtggtgtagatgggggccctcacagtgagtccatcttggcccccagtggcctgggagccgattctcatccctactggcttggttgggaggtgctgggccacacgcctacattcactccacctctttccatctttcttttttttttttttttttttgagatggagtctcgctgtgtcgcccagcttggagtgcagtggcacgatcccggctcactgcaacctccgcctcccaggttcaaatgattctcttgcctcagcctccaccaccacacccggctaatttttgtatttttcatagagacggggtttcaccatgttagtcaggttggtctcaaactcctgacctcaaatgatccgcctgcctcggcctccccaagtgctgggattacaggattacaggcatgagccactgtacccggccatctttctgtctttctctgaagtccacttggtagccctgtgcggggcacccatggtgacgtgagagaatgccagccccgttgtcttaggtctttcacgccaggccaagcagtggtctttggggagaggagaggtctgagccgaggggtcttgaaggatgagtaggagtttgctggccgccccagggggacaggctgccctatgcggtgggagctggggtgcccagagcctcaatgcccaccccataaggcagaaccacgactcccgagccacgtgctggggtttggggtaggacagtgagtgtggcagtgagttgcgaaggaagaacttggactgtggatgcagaagacctgggttcaaatcctgcctggctcacttcccaggcggtggctccagacaagtcacttggggagcaccgttgggaggtgagggcgagcccacaaacatgcatagcttcagggtcctgctctgccccgcaccccgttccccatccaagcctcagtttcctcatctgtaaaaatgggctacaggaggcttctgcgaagtaacgcacatcaagagctttgttagcacaagctcatcgaatattctccttgttcttgttattcttggcttccaagcagccaaccagagcgggtaccaggtggggttgtaggggctgcctgatcctgccctcctcacctgtggcccaagggtggtgacctggcatcctctaggtatggggcaggcggcatgcgtgggaggctctgccagcctttttggcattttgtttgttcacttgacagacattttcttgggtgtttattgtgtgccaagcactgtgccaggacctgattcctgcccttggggcagactggcaaaagataaatgccacctgacaggtgagagagtggcaagagtgacggaggaagaactgggtccgggagcagggtaattcggagagtagagttttagtagcatagcagggagggccttcttggccaagtggcatttaaggggccacacgaaggggatgagggagggagccaggtgtgtgcctggagaagagcgtttctggcagcaggagcaacccgtgcaaaggccctgaggcaggatcgcacctggcgtgttgggggaacagcatggaggcctgtgtggctggagcagagtgagccggggggggggcgggagggaggaggggagggccctgtgggcagcggggaggactgtggcttttcccctgcggaaggtgggggccacggagggttgtctgcagaggagggagggaggtgccctggctcggcactcacgggcgctctctggtggctgctgcaggaggacagcgttttggttggtgatgagcgtgaacacagggaccgcacagacaataccttccagggtctgagagtctggaatggaatcgcccagggagacatggtggggtgcacccctcgtcctcccttctcttggatctgtttcggatgtgctgaaggattgattctgagatgcgagagaaaggaaggagtcgagaatgactccaggtttctggcatgagtgcctggtaggaccaagccaaagttaaccaagataaggagggtaggtgagcggtgggtgagcaggcttagggagtgatcgggagcttggctctgctcttctgggtatgaggggcctggggcccctgaggagacatgaaggagacaatgggcacgccagtctgggcttctagggagagaggtaatataggagttaccagcccatggctggtatttacagccatgagcctggatggggtcacctggggactgggtgtggacagagatgcctgtcctgaggctccctgaggttcgaaggtagagtgggagactgagtgggagtgactgtgaggagaggagtcggggtgtggagcccctgcaggcagggaaggagggagagctggctgggtgcctgctgcacaggcccgggggagtgggggtagctgaggctgacactgactgtgggggcgaaagcgtgcttggtttgagttctaggactgggggacaggaggtggagtgagtgagtgtagatgataccttccagtgcccgaggcaggaagttgggtcaggagagaatgttttctagagggaaaattccaaacgtgtaggtacagccccacagtgtggccaggggaagggcagaggagggctgcctggtgggctccagggcctgctccctcaatgtagcaggggtcccgagtggggccagcggacctctgggtcagccagggctcagcctggctgccagcacctccccgagctcaggaggaacagccatacccatctcttcccagacaaggaagcctcatcctcagtggatgccccctaactccctgggaccagggatgaccaagccactgagccaacccaccctcaggtgccggggcccaaggcccacacttgggggtccacggggcttctggctggggcgtctggttggctgtattcaagtgcacacacacacactgatcttccccacatggtatgttctgggtctggggacagctcacccagaccccaccccagagcctggggcggctgggcccatagggacagtgcttccatggctgggacaggaaacagtttacaaggcagctcacccctggcctgaccagcaggcacctgctctgctcagggaaagtgttcctgatgctccttggccagcatgagacaggcctgctgcacaccccgtgtcgactgggctcaggcccccgtccctgggtgctgttgcccacaaaccctcatctctgttctgtccacgctgcgctgactcctttctgggccagggtttgcatcttggcaagctgctctgctgtgcacccccctcctgggacaatgcatacctgtgttggagccttgtgaggagctgtgcacacacgtggactgccacacggactgccccttgaatgaggacttagccttggctggagctccctgcagctcagcaggggacctgaccctggggacaggggtggtgggaggtggctgcaggctctttcctccgggctgcgtcctcagggcacattcctgtttcccactcagccatctgtgccgaagctggatgtgggtttgctgcaccaggagaggtgggggttgaggtgggagtagctcctcatgtcctgtcacttacatacctggagcagtgacccttcccatgccctgaccagaaaccacaacaaccgtgacagctgcctactcgtgtcccttcctgtgcgatgcctgctcttttcgtggggggagacagaatctctgttgcctaggctggagtgcagtgattcgatctcggctcactgcagcctccacctcctgggctcaagcgattctcctgcctcagcctcctgagtagctggggctacagtagccaccacgcccagctaattattattattattatttttttttttgagatggagtctcgctctgtcacccaggctggagtacggtggcgtgatctcggctcactgcaagctccgcctcccggattcacgccattctcctgcctcagcctcccaagtagctggggctacaggcgcccgctaccacacccagctaattttattgtatttttagtggagatggggtttcaccacgttagccaggatggtctcgatctcctgacctcgtgatccacccgcctcggcctcccaaagtgctgggattacaggtgtgagccaccgcgcccgggtactttttgtattttttatagagacgggatttcaccatgttggccaggctggtctcgaactcccgacctcaagtgatccgcctggctcatcctctcaaagcattgagattacaggcgggagccaccgtgcctggccatgcctgctcttacttcctcctcctgtgactgccttcctgttcacacatttggaaaaagtagtccagaggtgaagtgacttgcccaaggtcaccccgctcaggagccttctcaagccgtgtctggctgcccagccaccaggctgcaggtggaggctcagggttgatggatctcaagctgctctgcctgcctggctgcctgggtccccttgccccagctgggacagccctgctctgaggaccagacacaggcaggtgttgtgctatccgcagtggctgtttctggaaggcaggagcctgccttcacttctgcaccacttagcacagtgcctgcaggccctgggctccaggcatctctcgactcctccacaccgttggcagccgcgttggtgcagcacccagggaaccggcgggaaggttgtgggggcagtcgtgggtggagtgtggggattcacagaacctcgccttcccgcccagtggtgctcatcggggactcaggcgtgggcaagagcaacctgctgtcgcgcttcacccgcaacgagttcaacctggagagcaagagcaccatcggcgtggagttcgccacccgcagcatccaggtggacggcaagaccatcaaggcgcagatctgggacaccgctggccaggagcgctaccgcgccatcacctccgcgtgcgtgtcggcagcctgggcagggacgctgagattcgggggcgtgggcttgcagcgcgtgggcttggaaggatgtgtaggagttgggcaggagaaggggagagtgtgctcccaagaccagggagtgaggctggaagaacgctttagccatgcgccgtgggaccctcaggctgaccagcgcccagccttcgccacaccagggtatctctgggtaccaagtgcagtgaggacctagctcaggccactccgccttgccgctgcccctgcccagccagcatcccagccttcctcctccctcagcttccctcctcactggtgcccacacctggtcccacacgcctcctgtcctcccacctgggcctggcctccattccctgcaaaggcttcccagccatcaggacccactcagctgcctttttctggacccctcccaagccccccagccattcccaccaccgtcttgagatcctctgggctccctcccatctccttcatccctcaggtacatctgtctctctgtcacctcctcttgtttttttttttttgagatggagtttcactcttgtcgcccaggctggagtgcgatggcacgatctcggctcactgcaacctccgcctcctgggttcaagcgattctcctgcctcagcctcccaagtagctgggattataggcacatgccgccataccaggctaattttgtatttttagtagagatggggtttctccacattggtcaggctggtctcaaactcccgccctcaggtgatccaccctctcggcttcccaaagtgctgagattacaggtggcgtgagccaccgtgcctggctgtcgcctcctcttttttggagacagacagggtcttgctctgtcgcccaggctggagtgcagtgccacaattgcagctcactgcccccttgacctcccaggctcaagcgattctcctgcctcagcctcctgagtagctggggctacaggcctgtgccaccatgcctggctaatttaattaattaatttatttattttttagttttagtttttgagacagagtctcactctgtcgcccaggctggagtgcagtggcgcagtctcagctcactgcaagctctgcctcccaggttcacgccattctcctgcctcagcctcctgagcagctgggactacaggcgcccaccaccacgcctggctaattttttgtatttttagtagagatggggtttcaccgcattagccaggatggtctcgatctcctgacctcatgatctgcccgcctcggcctcccaaagtgctgggattacaggcgtgagcgaccctgcctggcctatttatttatttttttgagatagagtctcactctgtcatccagactgaagtgcagtgtcacaatctcggctcactgcaacctccgccccccgccccccagggttcaagcaattctcctgccttagcctcccgagtagctgggattacaggcgcctgccaccacgcctggctaatttttgtatttttagtagagatggggtttcaccatcttggccaggctgatcttgaattcctgacctcgtgatccacctgcctcggcttcccaaagtgctgggattacaggcatgagccacgacccccggccaatttttgtgtttttctagtagagatggggtatcgccatgttgcccaggctggtctgaaactcccagcctcaagtgatccacccgcctcagcctcccaaagtgctgggattacaggcatgagccaccatgcccagccccttcttccctttttttgatgacctcacggtatcttctatttccagctcccaaactccctcctcagacccccacatttcagagctggatccagggagcagcgctggggcctccagacacacacccttcccttgaggccacaatgactgccccttggctcggccctggacgacccaccctgggcgtgatgtgtgctgttatcccgtgaggctgccgctgcccatggttgtcctccagagaggctcatgggcccctgaccctgcaggtactaccgtggtgcagtgggcgccctgctggtgtacgacatcgccaagcacctgacctatgagaacgtggagcgctggctgaaggagctgcgggaccacgcagacagcaacatcgtcatcatgctggtgggcaacaagagtgacctgcgccacctgcgggctgtgcccactgacgaggcccgcgccttcgcaggtgagcagacggagacgcaggcatcagagaggtgtctggaaggcaggaggcccctcacagtgttggggccctggccacagccctggcttcccttccctgaggagtggccttgggatgggccaggtgggtgggcggggtccctgagagcatgtgggagcctgtcaccctgcctccccactcacctaggcagtattctttgttccagaaaagaacaacttgtccttcatcgagacctcagccttggattccactaacgtagaggaagcattcaagaacatcctcacaggtggccggggaccagatgggtgtgggtagggcaccagccaggcagggtggaacacggcctctgaaccttcgcttgttttgttcgtttgcttgtttttttcttttttttgtcggggcaggatggatttttgctctttgcccaggctggagtgtggtggctcgatctcagcttactgcaacctccgccttccaggttcaggcaattctcctgcctcagcctcccgagtagctgggattacaggtgcctgccaccacacccgctaatttttgtaatttttagtagagacaggatttcacaatgttgtccaggttgatctcgaactcctgggctcaagtgatcctcctgcctcagcctcccaaagtgctgggattacaggcgtgagccactgcacctggcctgtttgatttttttccaccaccacccctaacctttgctttttaaacctgccggtccacctggacacttcacagggtcagaccaggtctagcccttgctggcactggggacacagagaccccctggccccagttcctggggatgggccctgccttaactcttggcgctgcggggaggcgggtagcctcagggacctggagccttttggcttctgggagtttacctctgagggaggagggcgcttctgatcttagggagcgagaggccggggctggctgtgaccagatgtgggtcctggctgggtgcgcagcccctgtccttgttacccctgatgtgatgggggcgctgtgggggtctggagagggcctctggagtcctgcagggaggggttcccctcggcaggcagggcacgtgctggctcaccccacgtccccctgtaccccctttgcagagatctaccgcatcgtgtcacagaaacagatcgcagaccgcgctgcccacgacgagtccccggggaacaacgtggtggacatcagcgtgccgcccaccacggacggacagaagcccaacaagctgcagtgctgccagaacctgtgacccctgcgcctccacccagcgtgcgtgcacgtcctccgcccgcccccgccacggtatcctctggcccctccctgctgtccctctgtggccggctcgttccagccctcccagtgagctctgcacggccgggccggggcccaggaaggacaggagccagtgctaccccgtcctgcccggggaaaagctagaagccccggtttgctgcacccatgaaactcgggtccccacagcgtcttggcggggtggggagggcggcaggatggacggggctggccagaggcgaggaggacgggcggacggcgccgccttctccccttttccttggccgactctagggagcgattgcctccctccctccgtgaccgggtggcccagccagcccgtcgtccccacccagaaccgtgctctgggccaaagcccgaagaaccaggcagcgggggccggggcaggcggaccccccgggctctcagcgcccacccgctcctccgcacacagcagctcgcacaggcctcccacctctgcctgttgattgatgcagggagaagcccgtccccccctctcccctctcccctcccctctcctgcacgcaacgcgccctctcggccctccctgtccccctcctctgtctcgtctccccatctggtctggaacctgtttgcaagtgaagcaatatctccgtgttttgtatatacaaccgctcttgtagcctttggtttttgttaatgtagagaaacacagattctttatacactttgtaagatttacgccaaaccccagctctcgatctcttcttctccctgtggcccctgcgctgttgccccgtccccgtcaccccgcccgttactgaaatgtataatctgacttcctgtacagaaacctgccgctgcgcctctgtcttctttcttttccgccaggcgccagctcctaggctgaggcccctctcgctgcacgttccccaatgcaggccagaccccccgtctccccagcccaccccacaggaagcgagaggaccccagcacctgccaagggcagcgtggaagtcagccagcgcagttggggtgggccctggtcaagctgcccctgtggcagggagggatggaaggctgccgcttgtccttgactttaaactcctgggtcctaggacctcaggcctgcgggcgtcccctgatggggatgggagccaagagcagtggccagggttcatcactttgtctcctgccagggcctcccctcccctggggtcctgacgagggtgacttgcccagtggatgttggtgatgccagatgtctccaccctaaactgacaccggaggagggcccagtggggaaatgccagggacagcaaaatgtgtggcatggagttcctcttcccaggatccagcgtctccctccacctcacccctgcagtgaccttgggaccagtgtgagctgccagcagctgtccaaaagctccagcctctagctgaagaggccacccacaccctgaagaccctggggacccatgagagaggacagcaccactccctcttgattctagactggctgccctgcctggagggataggggatcacagacaccttttcccagaagagctccaggtcgctgggagctgtgtagacacaggagttggaatgagccaaggtgtgcgctccaggcccagggagcagcctggcacagagctaactggcagaattggaggcacctgggcaccctgggctccaaggcccattcacagagacccctgggacatggattcccctgggtttgggcagggcaggtcatgtggtggacagaggcattgggtgctaagcaagaaagcaccttgagcttttgtttgtttgtttgtttgttttgagacagagccttgctctgtcacccaggctggagtgcagtagtgtgatcttggctcactgcaacctccacctcccaggttcaagggattctcctgcctcagcctctggagtagctgggattacaggcacatgcgaccacacccagcttatttttgtatttttagtagagacagagttttgccatgttgcccaggctggtctcgaactcctgacctcagatgatctacccgcctcgacctcccaaagtgctgggattacaggcgtgagccaccgtgattggccttagcaccttgaatttcaagcagtcaaaagatcaacaaatatttctagagccgccattatctgctaggcctgagatggggactgactgacatactctatgtccctttaagagtcagaagccagcaatgccagtttaattactctgatttcagtgatttaataagcacgtcctgctcactctgccagactctgttcttaaatcttttattattatggtaacatacacataacataaaacttaactttttttggccaggcgcggtggctcacgcctgtaatcccagcactttgggaggccaaggtgggtggatcacgaggtcaggagattgagaccatcctgactaacatggtgaaaccccgtctctactaaaaatacaaaaaaaaattagccaggcatggtagcgggcgcctgtagttccagctactcgggaggctgaggcgggagaatggcgtgaacccgggaggcggagcttgcagtgagcagagattgtgccactgcactccagcctgggcgacatagcgagactccgtctcaaaaaaaaaacttttttttttttttttaagtcagggtctcgctctgtcgcccaggctggagtgcagtggcatgatctcactacaacctccaactcccaggctcaagccatcctcccaccgcagcctcccaagtagctggaaccacaggcacacgccacaacgcctggctaatttttgtattttttgtagaggcaggggtctcactgtgttgcccaggctggtctcgaactcctgggcccaagaaatccacccacctcagcctgtcaagatgttgggattacaggcttgagccaccatgcctggcccatatggcaattctacgtttacttttcttagggaccgtgttaaatctttcacacatcattatttgttatttgcaacaacccaacgaggtgggcataatatactggccccttttacagaagttaagtgattcccctaaggtctcacaattagtaagatgcagacaggtttcaaacccagaactgtgtgtaaccgctaagttatgaggcttctctgagcatttattgagtaccagctatgagccagaaaactctaagaagtggataaaatgcccagataaaaggctgggaagacagccgggcacagtggtgtgacctgtagtcccagctactctgggtctgagacaggagaatttcttttttcttttcttttttttgagatggagtctcgctctgtcgcccaggctggagtgcagtggcttgatctcggctcactgcaacctccccctcgcctcctgagtttaagcaattctcctgcttcagcctcctaagtagttgggattacaggcacatgccaccacacccggctgatttttttttgttttttttttttttggtagagatggggtttcaccgtgttagccaggatggtttctatctcctgactttgtgatccgcccaccttgggctcccaaagtcctgggattacaggcgtgagccaccgcgccagggcaacaggaggatttcaagtagaaactgccaatgaaaaaagagagagagagaaggatcacttgaacccaggagttacagtccaacctgggcaacacagcaagacccagtctctaaaaaaataataaagaaacgctgagagcatggctcacgtctgtaattacagcacttcaggagaccaaggcaggcagattgcatgagcccaggaatgcgagaccagcctgggcaacatgatgaaaccacgtttctacaaaaaatacaaaaattagccaggcatggtggcacgcacctacttaggaggaggagatgggaagatcaattgagtcagggaggtagagaatgcagtgagctgtgatcacaccactgcactccagcatgggcaacagagggagacactgtcacagtgaatgaatgaatgaatgaatgaatggagactgggaagaagtataccaactttttaaaaatgttttatggggtgggtgcagtggctcatgcctgtaaccccagcactttgggatgccgacgcaggcagatcatttgaggtcaggagttcgagaccagcctggccaacatggcaaaaccccatctctaataaaaatacaaaaattagctgggcatggtggcaggtgcctgtaatcccagctactccaggggctggagcaggaggatcacttgaacctgggaggtggaggttggagtgagcagagatagtaccactgcactccagcatgggcaactgagtgagaccctgtctcaaaaaaaaaaaaaaaaaaaaaccacctaaaggtttgattagagtcaggactggattgagcgctgcctaactagtgtcgtgtacatacattagaagacacattacattaatgtttccctcttttgtggcattagcagctgctaatgagcattaccaagcttcataatccattagcggctacaaaatggtgatatgcaaattgtattccttctcttatttctggaatactttttttttccttttttttgagatggagtctcactctgtcgccaggctggagtgcagtggtgagatctcggctcactgcaacctctgcctcccaggttcaagcgattctcctgcctcagcttccccagtagctaggactacaggttcacaccaccatgccaggctaaatttttgtatttttagtagagacggggtttcaccatgttggccaggatgatctccatctcttgacctcgtgatccgcccgcctcggcctcccaaaatgctgagattacaggcgtgagccactgcaccgcccagccaggttacttttttttcctttgagacgggtcttttttttttttttttgagtcagtctcattctgtctcggctcactgcaacctccacctcctgggtttaagtgatcctcatgcctcagcctcccaggtagctgggattacaggcatatgcccagctaatttttgtgtttttagtagagatgggatttcaccacattggccaggctggtctcgaactactggcctcatgtgataaacctgctttggcctcccaaagtgctaggattacaggtgtaagacaccgtgcccagccttcttttttttgttttcttttttgtgtatttatttatttatttatttatttgagacagaatggctctgtcacccaggctggagtgcagtggcacaatctcggctcactgcaacctctgcctcccaggttcaagcaattctcctgtctcagcctcctgagtagctgggactacaggtacacaccaccatgcccggctaatttttgtatatttattatagatggggtttcaccatattggttaggctggtcttgaactcctgacctcaagtaatccacccacctcagcctcccaaagtgctaggatcaggaatttgacaccatcctggccaacatgatgaaaccccgtctctactaaaaatgcaaattctagatgggcatggtggcaagtgactgtaatccagctactcaggaggctgaagcaggagaattgcttgaacctgggggcagaagttgcagtgagccaagatcgttccattgcactccagcctgggcgatagagtgaaactccatctcaaaaataaataaataaataaataaataataaataaataaatgaaattatctgccaggcacagtggctcacgcctgtaatcctaccactttgtgaggccgaggcaggaagatcctttgagcccaggagctcaaaactagcttgggcctcatagcaagccccgtctctattatttaaaaattaaggccaggcacagtggctcacgtctttaatcccagcactttgggaggcctaggcaggtggatcacgaggtcaggagtttgagaccagcctggccaatacggtgaaactccgtctctactaaaaatacaaaaaaactagctgggcatggtggcgtgcacctgtattcccagctacttaggaggcggaggcaggagaatcgcttgaacccaggagacagaggttgcagtaagccaagattgcaccactgcactctagcctgggcaatagagggagactccatctcaaaataaaataaaataaaaaattggctgcgcgcggtggctcaggcctataatcccagcacgttgggaggccgaggcgggcagatcacgaggtcaggagatcgagaccatcctggctaacatggtgaaaccccgtctctactaaaaaatacaaaaaaatcagccgggtggggcggcgggcgcctgtagtcccagctactcgggaggctgaggcaggagaatagcgtgaacccggcaggcggaggttgcagtgagccgagatcacgccactgcactccagctgggcgacagagcgagactccgtctctaaataaataaataaataaataaataaataaataaataaataaaatatcattcgccactaaaatgaaccagggctcttcggaaaaatggttgagtccaggcctggggcaggcaaaagacaagacaagtcagcctggaagagtttgttgagccagttagtaaggaaatgccccaagatggaattagaaaatcaccatttggggccgggcgcggcggctcacgcctgttatcccagcactttgggaggccaaggagggcggatcaccaggtcaggagatcgagaccatcctggctaacacggtgaaatcccatctctactaaaaaaaaatacaaaaaattagccgggcgtggtggcgggcgcctgtagtcccagctactcggggggctgaggcaggagaatggcgtgaaccccggaggcggagcttacagtgagccgagatcgcgccactgccctccagcctgggcgacagagcaacgctccatctcaaaaaagaaaatcaccatttggttgctattatggtaataactgactcaggcaagggtcatcaattgatattaagctcttggaaacggcgtgtgttgaggaacaggctatttaattactttcgaagtatctccccagaaagcacttattaacaaagtgtaaagtcaggtgccgtggctcatgcctgaggttaggaatttaagactagcctggccaacatggcgaaaccccatctctactaaaaatacacaaattagctggacgtggtggtgcgggcctgtaatcacaactactcaggaggctgaggcaggaaaatcacttgaaccggtggcggaggttgcagtgagcagagagggcgccactgcactccagtctgggccacagaatgagactccatcgccaaaaaagaaaaaaaaaattggtcgggcgtggtggctcctgcctgtaatcccagcactttgggaggcggaagtgggcagatcacttgaagtcaggcgtttaagaccagcctgaccaacatagtgaaacctgcctctactaaaaacacaaaaattagctgggcgtggtggtgcgggcctgtaatcccagctactcgggaggtgagccaggagaatcccttgaacctgggaggcagaggttgcagtgagctgagaccacaccattgcactccagcctgggtgacagagtgagactctgtctcaaaaaaaaaaaaaaaaaattaaaattaaataaaatattaaaaacaacaacaacaacaaaacaccacagtgtaacatactaacctcacactggagaaactggcagacaccatttgaaccaagttagcacaatcgatagtggacaaaatcagcattgtatgcatcctgaaaacacaacgtcacatctgtttcctgccacaaatgcaaaatcatgagaaagtattagacaaatagcaatggaaggacttcctgcaaaattactagcctggaatttttgaaaaatattgatgtcatggagagaaggtaagattgataaaatgttccagaaagagagactaaattagagtcgttaacaacaaaatacaatgcttgatcctgggatggatttgggattttttgttttttgacacaggatcttgctctgttgcccaggctggaatgcagtggtgaggtaatggctcactgcagcccagaactcctgggctcaattgatcctctcacttcagcctcccaagtagctgggaccacaggaggatgccaccacaactggctaatatttttattttattttgtagagatggggtctcactgtgctgcccagactgatctcagactcctagacccaagagaccttcctgccttgggctcccaaagagctgggattgcagacatgactcactgtgcctggcctggactttggatttttaaaggactttattggaaacttttcttttcttttttttgagacagagtctggctgtgttgcccaggttagagtgcagtggcaagatctccgctcactgcaacctccaccttgcagattcaagcaattctcctgcctcagcctcctgagtagctggaattacaggtgcccacaacaaaacccagctaattatttgtatttttagtacagacagggtttcaccatgttggccgggctggtctcgaactcctgacctcaaatgatccaagtgctgggattacaggcatgagtcactgcacctggcctttgaatgggctctgggaattacatgataatattagatgaacattaattttctgattttgaaggttatactgtgattatgtgcaaaagtgtgcttatactaagtgaacatatagtgcagtatttttttaaaaattgatctgtcttagagatgggggtgggtgagtttactatgttgcccagactggcctcgaactcctgggctcaagtgatcctcttgcctcagcctccagagcagctgggactacaggcctgggccaccacacttggctaacttttattttattttattttattatttatttatttatgtatttatttgagacagagtctcactctgtcacccaggctggagtgcagtggcgcgatgtcggctcactgcaagctctgcctcccgggttcacgccattcctctgcctcagcctcccgagtagctgggactacaggcgcccgccaccacgcccggctaatttttttgtatttttagtagagacggggtttcaccgtgttagccaggatggtctcgatctcctgacctcgtgatccgcccgcctcggcttcccaaagtgctaggattacaggcgtgagccaccgcgcccatccttttaaattttttgtagagacgggaactcaccatgttgcccaggctggtccccaacatctggcctcaagcgatccttccgtctcggcctcccaaagtgctccgattacaggcatgagccactgcacccggccagtctcaaaaaaaaaaaagttaaattctgcagaggttttatttattagaggacgctggccgtctgcaggtggcgcagcagcaccccctcgtgcctggggcggggctggggcggggccagtgctggggcggagccggagctgggggcggagccaagacgcggcaggggcggagccagcagctgcggcacagcggggcctgtgcggcccaagtcgtccctgtggcctccggccccgcctcttagggcgggacgtgcaaggcgattggcgaatgcaggcgagaggcggtcgctattggtccgcggcgctgtcggctcggcgggcggtgcccggacgcaggtgccggccggagcggagctagtggcgccgacgggccgggccgggccgggaccggggccgaggcgaaccgaggggcctgtgcggccgcccggcccggccgcggatcaggtaggcacgggcctgcaggtagggccggaggacgccagtccgcgggccggccccgggttcgaggccggagctcggcacccgggcgggacggctgggctcgatcccttggccacagccttctcggggacgcggggacctcagttcccgtgtcaaggccggtgggaggtctccggggtccggcacacataggcgcctctccgagcctcggtttccccacctgtgaaactgggtcatcccattgccaacctgatggggcttctgggaggattcaggaggtggctggtgcagaaaacgcctgacacacagtaggcaactgctaagtggccaatgcccttccccaacctccttctcagagcggctctgcctgcaaaatagtaagttataatataatgacccagccactttgcacaaagatgctgaaacaggatgccctgtgctatgtgggtgctcaaaacggggtagtcaaatgggcatgttgagctcattcagttcttttgaaaccatactgagtaggtggaagcagtagaaatgtcccctgttatacagttgagagagtccaggctcaaagaggttaagtgtcttgcccagggccacacagcacataaggagtagagctgggattggaaccttgcttctcatgcagggaggaatgaatgcaataacaacctccacatttaccctaaaaaatattaatagagcttttattgagcacttactgtgtgtgccagggttgactgtgtgacctctcatcaacaactctgtaagctgatgatagtaattataataagagctaatagttattaacttcttaattttttactaatttatgaactacatatcattatgactccccgtcttttttttttttagacagagtctctctctcttgcccaggctggaatgcagtggcacgatctgagctcattgcaacctctgcctcccagattcaagcgattcctacctcaccctggtcaagtagttgggattacaggcccccgccaccgtgcctggccaatttttgtctttttagcagaaacggggtttcaccatgttgaccaggctggtctcgaactcctggcctcaagtgatccaccttccttgaactcccaaagtgcacaaagtgctgggattacaggcgtgagccactgcgcccggcctgtaacactcattttagagatgataatactgaggctgagagagtaaaacagctgcctgagaccacaatgtagggagttttagggccctctgattcctctgccctctgtttcctaccttcaggaaaaggagcctgggcaggtatggaaaagactggggggcctcagtgccaccctaaacaagcctagctaagggtgagctttactggatgaattcagcctggaggctccttctcaggagacccctccacggacagagtccaccagctccatcattagaatgaggcccagagaagcaaagtgacttgaaccaggacacccagcatcggtggcatagccaggagggccaggagttaaagaacccaggtctcttgaggtccagaaccactccctggactgttttaagttcaaattctgacaccaccccttcctagctatatgaccttgggaaagtaggtgcctctctccgagcttcagcctctttccccatcatagggtgtaattattggtttgttgtgaagactcaatgagatctatctccaggccgggcgtggtggctcatgcctgtaatcccaacactttgagaggccaaggcgggcagatcactaggccaggagttcaggaccagcctgggcaacttggcaaaacaccatttctacaaaaaaatacaaaaattagctggatgtggtggtgtgcagagctactcaggaggctgaggtgggaggatcacctgaacctgggggcggtggaagcttcagtgagctgtgattactacactgccctccagccttttgggtgacagattgagaccctgcctcaaaagaaaaaaaaaaaaaaacagacaaaagaaagaaaagaaataggccaggcgcggtgactcatgcctgtaatcccagcactttgggaagccaaggcgggtggatcacctgagataaggagtttgagaccatcctggccaacatggtgaaaccccgtctctactaaaaatacaaataattagccagctgtgggtggagggcaccggtaatcccagctactctggtggttgaggcaggagaatcgcttgaacctgggaggcggaggttgcagagaaccgaggtggtgccattgctctccaccctgggcaacaagagtgaaactccatctcaaaaaaaaaaaaacaaaaaaaacaaaaaaaaaaaccagacaaaagaaagaagagaaataaatctcctgggcactgggccaagtttgctggagccatcagatcactctcccatttcagcagcctcagagctgagtccgacttgcagtcaccctctctttgtgtccagcctcaagtttggcctcttccaggcctgggcctctgtggtttgagtggacctctagcctctaaatatctctgatgcccaccacaggggctggccgaccaggatcggagggtcaagagatgtggctctctcacgctgttcttaaacggagtgaggattgagaaatgactacaacatggccaggcacagtggctcatgcctgtaatcccagcactttaggaggctgaggtgggcggatcacgaggtcaggagttcgagactggcctggccaacatggtgaaaccctgtctctactaaaaatacaaaaattagccgggtatggtggtgggtgcctgtaatcccagctactcgggaggctgacgcaggagaatcccttgaacccaggaggtggaggttgcagtgagctgagatcggccactgtactccagcctgggcgacagagcgagactctgtctcaaaaaaaaaaaaaaaaaaaaaatgactgcagcagcaaccagaaatgcagcagctctgggctagacagagggccaggtgctggggacagcgggaggcaatctgacagggtctcttttttacagaattcactgtagggtaggacaacagacgtggctaaatacgtaggtgaataagtagaatgtttcagacagggacacatgccacgagtggaatcaagtggaccccattggcacttcattgattgattgagacagggtcttgctctgtggcccaggctggagtgcagttgtgtgatcatggctcactgcagcctcaacctgggtgcaagcgattctcccacctcagcctcctgagtagctgggattacaggcgcacatcaccacacccggctcatttttgtattttttgtagagacggggtcttggtatgttgcccaggcttctctcaaactcctgggctcaagcgatcctcccacctcagcccccaaagtgttgggattacaggcatgagccaatgcgccaggccccagacagcattgtcgagaaggcttctccaggaaggtgacctttgaaggagacacttataacaactgtttcgagttcagtgagatgatgactatgtatggagattgcttggcatagtgtctggttcttaatagatagaagctgctagtataattttggtggtttgcaggccttgcattaagagatttacctgtggttttttttttttctccctgatagaagaaatattagaacaccacatgcaggagctgggatagttcctgtaatatccagttatttgcagaaatgtaaagaccaggccaggggtggtggctcaagcctgtaatcccagcactttgggaggccgaggcgggcagatcacttgagatcagcagttggagaccagcctggccaacgtggtgaaaccctgtctctactaaaaatacaaaaacgagctgggtgtggtgaaacacagctgtagtcccagctactcgacaggctgaagcaggagaattgcttgaacccaggagcctgaggttgcagtaagctgagatcacaccactgcatttcagcctgggtaacagagtgagaccctgtctttttttttgggcggggggatgaagtcttgctgtcacccaggctggagtgcagtggcgtgatctcagctcactgcaaactccatctctcaggtttaagcgattctcctgcctcagcttcccaagtagctgggattacagttgcccgccaccatgcccaagtaatttttgtgcttctagtagagatggggttttgccatgttggccaggctggtctcgaactcctgacttcaggtgatccgcccgcctcggcctcccaaagtgctgggattacaggcatgagccactacgcccggccaataccctgtctttttttttttttttttttttttttttttttgagaaagaatttcactcttgttgcccaggctggagtgcaatggtgcgatctcggctcactgcaacctctgcctcccaggttcaagtgattctcctgtctcagcctcccgagtagctgggattacaggcatgcgccaacatgcctggctaatttttttgtatttttagtagacacggggtttctccatgtggtcaggctcgtcttgaactcctgacctcaggtgatctgcccacctcggcctcccaaagtgctgggattacatgcatgagtcaccacgcccggccaagaccctgtcttaaaaaaaaagaaatgtaaagacctagcctcagaagggctgggctggaggaaaggactcgcctctgcctgccttcccgtaaagagcccagccgcttcccctttggcctctgagcttaaggttctggttgcagggacttgggagggagagcagcaggcaccctgtgtcaggcccggccactgccctgtgggtgttatctcaggcctgcagtcttcctcttgggtccctgcctttgggcaatacttgcttatctggcctgcagaggcctgactatgatgctcagaagaacatgtgaggccaggaaggctgctggctgagctgtttagagggcatttatccagcagtgaaccgtcctagcgcaagagttagtaattgctcccctgttccttcacctccccactttggagctcagatttgtttttttgtttgtttgtttgcttgctttcttttgttctgttttagagactggagactgggtcttgctctgttacccaggctggagtgcagtggtgtgatcatagctcactacagccttgaactcctgggctcaagaggttgaggctccctcctcagcctcccaagtagctgggactacaggctttcagcaccatgcctggctaattcaaaaaaaccttcagagagatagggtctctctatgttgccctagctcgtctcaaactcctggcctcaagtgatcctcctgcttggacctcccaaagcgctgggattacaggtatgaacaacttcccctggcccagggctcggattttgattggcagtttacaagctgacttggggtgggggtgggaatacttcgctgagtacttgattgcctctcttgcttggactttctgaacactttaggggctgcaggggctctggacattgtagctcttgggggttggacaagctgggaacagagatccttggctccagggcacctgtattggcttcaaggaggtctccagaaagggcccttgtttcttcaatgaaattctctgccgggccgggtgcagtggctcacacctgtaatcccagcactttgggagtccgaggcagatggatcacctgaggtcaggagtttgagaccatcctggccaacatggtgaaaccccatctctactaaaaatacaaaaattagccgggcgtggtggctcatgcctgtaatcccagcactctgggaggccaaggcaggaggatcacaaggtcaagagatcaaaactatcctggccaaaatggtgaaaccccatctctactaaaaatacaaaaattagctgggcatggtggcgcatgcctgtagtctcagctactcagcaggctgaggtaggagaatcatttgagcccgggaggcggaggttgcagtgagccaagatcgcgccattgcactccagcctgggcaacagagccggactccatctcaaaaaataaataaataaaatacaataaaaataaaaataattggccgggcgcggtggctcacacctgtaatcccagcactttgggaggccgaggcgggcggatcacgaggtcaggagatcgagaccatcctagctaacacggtgaaaccccgtctctactaaaaatagaaaaaattagccgggcgtggtggcgggcgcctgtagacccagctactcgggaggctgaggcaggagaatggcgtgaacccgggaggcagagcttgcagtgagctgagatcaggccactgcactccagcctgggcgaaagagcaagactccgtctcaaaaaaaaaataaataaataaataaataaaaataaaaaataaaaataaaaataaaaataattgccgggcgcagtggctcacacctgtaatcctagcactttgggaggctgaggcaggtggatcacaaggtcaggagatggagatcatcctggctaacatggtgaaaccccgtctgtactaaaaattcaaaaaattagccgggtgtgttggcgggcgcctgtagtcccagctactcaggaggctgaggtaggagaatggtgtgaacccaggaggtggagcttgcagtgagctgagatcgcgccactgcactccagcctgggcgacagagtgagactccgtctcaaaaaataaataaataaataaataaataaataaataaataattagctgagtgtggtggtgggcccctgtaatcccagctacttgggaggctgaggcaggagaatcgcttgaacccgtaaggtggaggttgcagtgagccgagatcatgccattgcactccagcctgggcgacaagagtgaaactccatcttaaaaaaaaaataaataaatataaataaaaatacaaaaactagccaggcatggtggtgcatgcctgtagtcccagctacttggggggctgaggcaggagaatcgcttgaacccaggaggtggaggttgcagtgagctgagatcgtgccactgcgctccagcctgggcaacacagcgaaactctgtctcaaaaaaaaaaaaaaaaaaaagaactggttctgataccttatctggaaaggtgatattagttgaaaggtggtcctggccctggaggctttgagggtaagaggaggcctagcttttcttgtcttctcttttttagagacaggttctcactctgtggcataggcaggagtgctgtgggcaccgtcatagctcactgcagcctcaaactcctgggctcaagtcatcctcccacctcagcctcacaagtggctgggactataggcttgtgctaccatgcctggctaatatttttggttttctttagtagagccagggtttcaccatgttgcccaggctggtctcaaactcctgagctgaggcaatcggaggcaggcggattgtcttgaatccaaagtgctgggattacaggtgtgagccactgctcctggcctaattttctcattttttataaagatagagtcttgatgtgttgcctaggctggtctcaaactcctggggctcaaacaatcctcctaccttggctttcaaagcaccgggactatagacatgagccaccacacctggccaggcctagctttcctgttttttttgggtttttttttttttttgagacagagtcttgctctgtcgcccaggctggagtgcagtggcgtgatctcggctcactgtaacttccccctcctgggttcaagcgattgtcccgcctcagcctcccaagtagctgggactacaggcgcgtgccaccaagcctggctaattttttgtatttttagtagagatggggtttcactgtgttagccagaatgggaaacctagcttttcttttttttttacttttttctttcttttcttttttttttttttttttgtatttttagtagagacagtgtttcaccatgttggccaggatggtcttgatctcttgacctcgtgatccacccgcctcagcctcccaaagtgctgggattacaggcgtcagccaccgcgcctggccagggaagcatagcttttcttaggagagtgagaaataatacaacccaagctcctgctgtataccagccttgtgctgagttacatgcatcgtctccttgaatcctcactggccctacagaggcccattttacagatggtgcaaactgaggctcagagatgtaaatggtctagtggtccctacagccttgacaagaggggactcaaaccttagtccgtcaggctcattaaccttgcccctaacctccgcactggcctgttcccaggctcctggaaccatgggcctcaggccctgaggatacggggctcccggtggccatgacgacgggtgactgctgccacctccccggctccctgtgtgactgctccggcagccctgccttctccaaggtcgtggaggctacgggcctcggaccgccccagtatgtggcacaggtgacttcaagggatggccggctcctctccaccgtcatccgtgccttggacacaccgaggtgagtggtgactgcgtggatatcctggcctttgttgcctcttctctctgggcgcagtgagtttctcccagcctggggttagaagtccaaccgttgacagagggccaagtgggtaaatagagaaagagacacaaacagttatcgccttgtggaaacagaggcctagctttggccgggtctgattctttaggaaaagctgaaattccagattattatgtgaaatctgaaggtcaaatgttgtcaagtaacacacttttgggaggcagtatagggggcggtcaggagtgcaggctgtgggctcagtgcctcggccctgaccctgagtggacacctctctctctcccagagtgacctgggacaaattacttcaccactgtatctctcttttttttttgaaacagagtctcattttgttgcccaggctggagtgcagtggcgcagtctcagctcactgaaacctccgcctcccaggttcaagtgattttcctgccttagccacccgagtagctgggattacaggcacccgtcaccacacctggctagtttttgtacttctagcagagacggggtttcgccatgttggccaggctggtctcaaactcctgacctcaggtgatctgcccgtctcggcctcccaaactgctgggattataagtgtgagccaccgtgcccagcctctttttaaatttttttttttttttttttttttagagagtcttgctttgtcactcaggctggagtacagtggcgtgatctcggctcactgcaacctccgcctcccggattcaagcgattctcctgcctcagcctcctgagtacctggttctacaggcacgcgccaccacacccagctaatttttgtatttttggtagagatggggtttcaccatgttggccaggctgatcttgatctcttgacctcataatccacctacctcagcctcccaaagtgctgggattacaggcgtgagccaccgcgcctggccgtgctcaacaaatattaaggctttttttttcctctcttctctgaatttgtttttttgttttgttttgttgttttggagacagagtctcactttgtcacccatgctggagtgcagtggcatgatctcagctcactgcaacctctgcctcctgggttcaagcgattctcctgcctcagcctcccaagtagctaggattacagcccccccgccccgaccatgcccgactaatttttgtatttttttagtagagacggggtttcaccatgttagtcaggctggtctcctgacctcagatgacccacccacctcggcctcccaaagtgttgggattacaggcatgaaccactgtgcctggcctcttctctgaatttgctctcccaaactttttcacagtttcccagaacaagctccaaactgacatgattcttcctcaagattctcgtcacttctgtttccctgggttggtttccggacaaagggttccttttttgttaactttgtttgtgtgtgtacttgggggagggtgggatcggggtatgggttcagaaaggaggcaggcaggcatgcccttttgccattgcaggaggaaatagcagtccagggacaggactgttgagaaagcagccatgagcagcctgttgggctctttttaaagccgcccaactccaccccgcagcatgagaatctgagaaaaggatagaaaacagtcatttccaggcaggcgtggtcgctcatgcctgtagtcccagcactttggaagtccaaggctgaaggatcgcttgagcccagaagctcaagaccagcctggtcaacatagtgagacccccctctctagaaaaagttaaaaaatattagctgtgtggcgtggtgccacctgtagtcccagctactcgggagactgaggcaggaggatcgctcgagctagggagtccgaggctgcagtgagctgtgattgcaccactgcactccagcctgggtgactcaaaaaaaaaaaaaaaaaagaaagaaaaaaaaatacagtctctctgagaggaaattggcgttgtctggaaaatagctcttctttgtgtgacctcacagtctgccttctggccagaaatgtttgggaaacagtgactcatggctgtttggcctctgggccacgccccctgcctcctgagctgccctgggaaggacccggcatccccagagactgggccagggctggagacttttccgaggcagctttctgcagatgctttttatttctatttccccctcacaagggcagaggagcaggtgagcacttctctctggatgcacaggtttctcaggtagcacgggcttcaggtgtgattagatccaggggcccgcaaagatgtccttaagaatctacctttcccaggccttgcgcagtggctcacgcctgtaatcccagcactttgggaggccgaggcgggtggatcacgaggtcaggagatcgagaccatcctggctaacacggtgaaaccccgtctctacaaaaaatacaaaaaattagccgggcgtggtggccggcgcctgtagtcctagctactctggaggctgaggcaggagaatggcatgaacctgggaggtcgagcttgcagtgagccgagatcgcgccactgcactccagcctgggtgacagagcaacactgtctcaaaaaaaagaaaaaaaaaaatctacctttccctgtctcttggctctgctctcctctgtgctggcatcattcacaggctccacacagactaggcagctgcaggagctccaggcttctgtcagccttgtggccgacagttctggagtttacggggaaacaaagaattttaggaatagattatcggtgactctgatggtatcatacaagcctgagttggttgcatgagcaggggtgcgtgctgttctattttctttttctttttttcaaatggtctcactctgttgtccaagctggagtatagtggtacaattatgggtcattggagctttgaactcctgggcacatgtgatcctcctgcctcagcctcccaagtagctgggaccacaacatgtaccaccacgccaagataagtctttaaaaaaaattttgggaccgggcgtggtggctcacgcctgtaatcccagcactttgggaggctgaggcgggcagatcacgaggtcaggagattgagaccatcctggctaacacggtgaaaccccgtctctactaaaatacagaaaaaaaaaaaattagctgggcatggtggcatgtgcctgtagtctcagctactcgggaggctgaggctactcgggaggctgaggcaggataatcgcttgaacctgggaggtggaggttgcagtgagctgatatcacaccactgcactccagcctgatgacagagcgagactccatctcaaaaaaaaaaaaagaaaattttttttttatagagatgagatctcactaggttgcccacactggccttgaactcctcggctcaagtgatcctcccgcttcagccttccaaagtgctagaattacaagcatgagctactgctcccggcctggtgttctgactggtccagtatgaggcctgaggtcatgaggagtgttgtctgctctgccctagtccttgaggatttttttttttttttgagacggagcctcactctgtcacccaggctggagtgcagtggtgtaatctcggctcactgtaacctctgccttccaggctgaagtgatactcctgcctcagcctccccagtagctgggattacaggcacctaccaccacgcccagctaatttttgtatttttagtagagacggggtttcaccatgttggccaggctggtcttgaaatcctgacctcatgatcctcctgccttggcctcccaaagtactgggattacaggaatgagccacctcacccagctggtctttgaggattaagagtcgaggattgggggccgggtgcggtggctcacgcctgtaatcccagcactttgggagcctgaggcaggcggatcacaatatcaggagatcgagaccatcctggctaacacggtgaaaccccgtctctactaaaaatacaaaaacacaattagccgggcgtggtggcaggtgcctgtagttccagctactcgggaggctgaggtgggagaatggcgtgaacccgggaggcggagcttgcagtgagccgagatcgcaccactgcactccagcctgggtgacagagcgagactctgtctcaaaaaaaaaaaaaaaaaaaaaaagagttgagggtggggaagttgtgcaggacaatcagggtgggtattttagggaaatttggagaggacatgggggcgggtataacagatgcccatcttgggtctgagagggtgctgcagggtccctgggaagggaacacatcactccacctgtgggagtctgggaaggcttcgcaaggttaccttccctgcatctccttcccaaagggaaggacatttagagctgggcattgaaggatgagtaggagttcactaagtggcagcatggggtaagggtgagcttgtgatccagtgggtagtgaagcaggtatagacagaaagcccaatcattgctcatgggtcctatctctgtgtccagtgatggtcctttctgccggatctgccatgagggagcgaacggggagtgcttgctgtccccgtgtggctgcaccggcacgctgggtgccgtgcataagagctgtctggagaagtggctttcctcatctaacaccagctactgcgagctgtgccacacggagtttgcagtggagaaacggcctcgacccctcacagaggtacccttaagagtctgagactgcggtgggcagtggggagagggcagacatgggggccaaaggcaggagctgccccgggcaatctggtggtcctcctagggcagaactccctaccgcccctgtccaccaggtgggtctgctgatggtgtgtcagaaaccaggcctagggtttaagagctcccagacccattaacctctccctgttttcattcagtctttcttcttcttctttcttcttcttccttctccttcttcttttttttgagacagagtctaactcttgtccaggctggagtgcagtggtgcgatctcggctcactgcaacttctgcctcccaggttcaagcgattcttctgcttcagcctcccaagtagctgggatgacaggcgtgcgccaccatgcccagctaattttctgtatttttagtagagatgcggtttcaccatgttggccaggctggtctcgaactcctgacctcaagtgatctgcccacctcagcctcccaaagtgctgggattacaggcatgagccaccgctcccagcctgtgtctttcattagcagagatttcctgggcacctccagcatgcccagcactctgttaggcactggggacccagccaccaacaagacacgtagggctgggcactcatggagattaaagtccagtaactttaatctggacttcaaagcatcgcttctgatatgaggttacagaaaaaaaaaaaaaaaatcaacgaagcaactggtttctgggagcaatagtgcagtaagggaaaaacatgtcacagggggtggggcaacttggggtgtcaggcaaggcctcaaaaggaggtgaaccccccagctgaggcctgagagatgaaaaggaacaagctgccgggcgcggtggctcatgcctgtaatcccagcacttcgggaggccgaggcgggcagatcacttgaggtcaggagttcgagaccagcctggccaacatggtgaaaccccgtctctactaaaaatacaaaaaatacaaaaaaaaaaaaaaaaagtccagacacggtggctcacgcctgtaatcctagcactttgggaggccaagatgcatggatcacctgaggtcaggagttaaagaccagcctggccaacatgggaaaaccctgtctctactagctatacaaaattagccaggtgtgggctgggcacggtggctcatgcctgtaatcccagcacttggggaggccgaggcgggcggatcacgaggtcaggagatcaagaccttcctggctaacatggtgaaaccccatctctactaaaaatacaaaaaattagccgggcgtggttgcaggtgcctatagtcccagctactcgggaggctgaggcaggagaatggcctgaatccaggaggcggagcttgcagtgagctgagatcaggccactgcactccagcctgggcgacagagtgagactccatctcaaaaaaaaaaattagccaggtatggtggtgggtgcctataatcccatccactagggaggctgaggcaggagactggcttgaaccctagggaggctgaggcaggagaattgcttgaaccctagggaggctgaggcaggagaattgcttgaacccgggaggcggaggttgcagtgagctgagactaagccactgcactccagcctgggtgacaaagcaaaactctgtctcaaacgatgaggaaaaagctaggtgtggtggcgcatgcctgtaatcccagctacttgggaggctgaggcaggagaatcacttaaagctgggaggcggagtttgcagtgagttgagatagcgccactgcactccagcctgggcaacagattgagactctatctcaaaaaaaaaaaaaaaaaaaaaaaaaaaaaaaaaaccaaggctggacgtggtggctcacaatcccagcactttgggaggcagaggtgggtggatcacctgagttcaggagttcgagaccagcctggccaatgtggtaaaacaccgtctctactaaaaatacaaaaattagctgggcatggtggcgggggcctgtaatcccagcttgaacccggaaggcggaggttgcagtgagccaagattgcaccacagcactccagcctgggcaacaagagcgaaactccgtctcaaaaaacaaaaaacaaaaaccctagaaaagcccctggcccacctaggagccagagtgtagggagaaaagtgggagggaggtccagccccttcacacaccctcccacacccactttggtctccgtgctacagccacacagccccctccccacacatcttgtctaggccgcctccccctatcccagggcctttgcatctgccgcccctgcagcctagagccccatctcccccattcttcacgtggttccttctgttcattccgttctcttcaatgtcacctccttggcaaggccttgccccatgtgaccgttcacccatttcatacctccactgccagcatgggagggcaggggccctttctgtctcatccaccagaatttcatgaattaagcccatttcttggctgggtgtggtagctcatgcctgtaatcccagcactttgggaagccaaggtgggaagatcacttgaggccaggagttcaagaccagcctgggcaacacagcaagaccctgtctctacaaaaaaatcaaagaaatgaaagaacttattattattattattattattattattattattattattttgagacagagtcttactctgtcacccaggctggagtgcagtggcacgatcttggcttactgcaacctccacctcctgggttcaagcaattctcctgcctcagcctcctgagtagctgggattataggtgcgtgctaccacgcccagctaattttgtatttttagtagaggcagggtttctccatgttagccaggctggtcttgacctcctggcctcaagtgatccacccactttggcctgccaaagtgctaggattacagacgtgaaccaccacaccagggctttttttttttttttttttttttagcccatttcttttggcctgtcatctggggaaggccaagcgtagtagattagtagccaaagacgcttcggccctggagcaagacttcccaggttggaaccccagctttgtggactatgtagctgtgtgagtttgctcacttgagttaattcctctgtgcctcagtttccccatctgtaaaatgggggtaaatgtgcccagcacctggcagggcctggctcctcatgggctcaataaatgtttgaaagaaggaaagggccaggcgtggtggctcacacctgtaatcccagaactttggaaggccgaggtgggcagatcacttaaggtcacaagttcgagaccagcctgacaaacatggtgaaaccccatctctactaaaaatacaaaattagcagggcatggtggcgcttgcctataatcccagctactcgggaggctgaggtgggagaatcgcttgaacctgggatgttgaggttgcagtgagccgagatcgtgccacggcactccagcctggctgacagagcgagactctgtctcaaaaaatatatatacatacaaaattagccgtgcatggtggcgcttgcctgtaatcccagctactccggtggctgagacaggagaattgcttaaacccagaaggtcgaggttgcagtgagccgagatcacaccattgcactccatcctgggcaacagagtgagaatctgtctcaaaaaaaaaaaaaagaaagaaggaaaggacagagggaggcctaggcctggaggtccttacccctccccctcagtagccccttctctgccccctctcctctgccccctatcctctcccctgcagtggctgaaggacccggggccgcggacggagaagcggacactgtgctgcgacatggtgtgtttcctgttcatcacaccgctggccgccatctcaggctggttgtgcctgcgcggggcccaggaccacctccggctccacagccagctggaggccgtgggtctcattgccctcaccatcgccctcttcaccatctatgtcctctggacgctggtgagtggctgtggttgtgcagcacgcgtctcgagctctgccgctgggagcagcagggccaaggatttggcccctggcttgtggggcacggggctccctggctgcctctgtctatggccgtgggtggaagagagcttctgaggtcaccctgcctctccaggagcttgagattccaaatgtgacaaaggtctagggaatccctgagccaggtgtgaaccttgacctgagtgcaggaacccccatccatgaacccccaagattaggagtggggcagagaggagcaaaagcctgagagagagatcgggggagaacaagatagtggggaaatatatattgattaagaaattgaggctgggcatggtggctcacgcctgtaatcccagcactttgggaggccaaggtgggtggatcacctgaggtagggagttcaagaccagcctaaccagcatgaagaaaccccatctctactaaaaatacaaattaaccaggtgtggtggcacatgcttctaatcccagctacttgggaggctgaggcaggagaattgcttgaactcgggaggcggaggttgcagtaagcctagatcatgccattgcactctagcctgtgtaaaaagagcgaaactcgatctcaaaaaaaaaaaaaaaaaaaaaaggaaaaaagaaaaaagaaagaaattgaaagggaaaacccaggcacagtggcttactcctttaatcccagcactttgggaggccaaggcaggtggatcatctgagcccaggagttcaagaccagcctggccaacatggtgaaaccttgtctctactaaaaatacaaaaatttagctgtgcgtggtggtgggtgcctgtaatcccagctactcgggaggctgaggcaggagaatcacgtgaacccgggaggcagaggttgcagagagccgatattgcgccactgcactccagcctgggcgacaagagcaaaactctgtctcaataaaaataaaaacaaaaataaattgaaagaggaaagccaggtgcggtggctcatgcctgtaatccccatactttgggaggctgaggcaggcggattccttgaggtcaggagtttgagaccagcctggccaacatggtgaaaccccatctctactaaaaatacaaaaaattaacctggtgtggtggcatgtgcctgtcatcccagctactagggaagttgaggcaggagcatcgcttaaacccagaagccagaggttgcaatgagctgagatcctgctactgtactccagcctgggcgacagagtgagattctgtctttaaaaaaagaaaaagaaagaaagaaaagaaaagaaaaattgaaggggaagagagagaggaactgagatgaaaacactgagtgaggccaggcccagtggttgtaacatctgcagtcctagcacactgggaggctgaggcaggaagattgcttgaagcaagaaggttcaagaccaggacggggcaacaaagccagatgcccatctctataaaaaatttaaaaattagtggtggtgtgcacttacactctcagctactctggaggccaaggtgggaagatctcttgaggttaggagttttagactagcagggcaacttagggagaccccatctctacaaaaggaaaataattagctgggcatgttggctcacacctgtaatcccaatattttaggaggccgaggtgggaaaatcccttgaggccaggagttcaagaccagcctgggcaacatagaaagaccccgtggctacaaaaaattttaaaaaattagctgggcatggtggcacatgcctgtagtcccagctacctgggaggctgagtcaggaggatcacttgagcccaagaatttgaggctgcagtgagctgtgatcacactactatactccaccctgggtgacaaagcaagacccagtatcaaaaaaagataaaaagcctgggtgcagtgcttctgcctgtaatcccagtattttgggaggctgcagcaggaggatcaccatagcccatgagttcaagatcagcctgggcaagatggtgagaccccatctcaaaaaataataataggggctgggcatggtgactcacgcctgtaatcccagcactttaggaggttgaggcaggcagattgcttgagcttacgagtttgagaccagcctgggcaaagtggcaaaaccccatctctagaaaaaatacaaaagtttgtcggccgtggtggtgcgtgcctgcagtctcagctactccggagggtgaggtggaggatcgcttgagcactggaggcagaggttgcagtgagccgagattgcaccactgaacttcagcctgggtgatagagcctgaccttgtctcgaagaaaataataatattaataaaagaaaaaggaaaaaaaaaaggctgggtgcagtggctcatgcctgtaatcccagcactttgggaggctgaggggggcatatcacttgaggtcaggagttcaagaccagcctgagaaacatggtgaaaccccgtttctactaaaaatacaaaaaattggccaggcacggtggctcacgcctgtaattccagcactttgggaggctgaggcgggtggatcacgaggtcaggagttcaagaccagcctgactaacatggtgaaaccgtgtctctactaaaaatacaaaattagctgtgtgtggtggcacatgcctgtaatcccagctactcaagaggctgaggcaggagaatcgattgaacctgggaggcagatgttgcagtgagctgagattgcaccattgcactccaacctgggcaacagagcaagactccgtctcaaaaaaaaaaaaaaaaaagaaaagaaaagaaaagaaaaattagccaggtgtggtggcacatgccagtaatcctagctactcgggaggctgaggcacaagaatcacttgaatttgggaggtggaagttacagtgagccaagatcgtgccactgcactccagcctgggtgcctgagtgacagaataagactctgtctcaaaaaaaaaaaaaagaaaaaaagcctgaatgagagacagacagaatgatgggggtgtgaggtattgttctaggcctctggtaggcagcagaacccttgcttagaggcaaaagctcccccaaatctcacccctcagacataaccactattgtccagctgtaggggagtccctgcctcacaaagtatttttcaatgaacctaccagcatttctttttttttttttttttttttgagacggggtcttgctctgtcacccaggctagagtgcagtggcacaatgttggctcactgccatctccgcctcctgggctcaagcgattctcctgtctcagcctcctgagtagctgggattacaggcatgtgccaccacacccagccaatttttatatttttagtagagacggggtttcgccatgttggccaggctggtctcgaactcttgacctcaggtatccacccaccttggccttccaaagtgctgagattacaggcatgaaccatcgcgccctgcccctaccagcatattttaaaatatgtaaataggatgaaatcatagctactgttttagcatctgcttgttttcattttgctggtgttctttaaaaaaaaaaacccacacacacaacgaggcagccacccagcagacattcattgtatgggtggaccatatttatttaacaaatcacttttgacaggcactgggattttttccaatgtgtgtgtggttttatttctacttccttgttttttccattatgaacagtgctttgggactgtccatgcaaatgtttcttgggaacttgcttggtcaaaggatgtgaaccactgacctttatttatttatttatttatttagccggagtctcactgtgtcgcccaggccagagtgcaatggtgcaatctcagtttactgcaacttccgcctcccgggttcaagcagtcctcatgcctcagcctcccgagtagctgggattaaggcatctgccaccatgtctggctaatttttgtatttttagtagagacgagttttcaccatgttggccaggctggtctcgaactcctggactcaggtgatctgcccaccttggccttccaaaatgctgggattataggcgtgagccattgcgctaagcaacatttattttttaatttttttttttttttttgagacagagtctcgctctgtcaccaggctagagtgtagtgacgcgatcttggctcactgcaacttctgcctctcaggttcaagcaattatcctgcctcagcctcccgagtagctgggactacaggtgtgcgccaccatgcccagataattttttttatttttagtagagacagggtttcaccatgttggccaggatggtctcgatttcttgacctcgtgatccgcccgtgtctgcctcccaaagtgctgggattacaggtgtgagccaccacactaggccatttttaaatttttttatagactaatttttagagcaattttaggttcacagcaaaatttagcagaaagtacagagagttcctgtatatcaccctgctccatacgcacacaacttgcacagcctcccccactattaacatcgtttacccaagcagtgcatttgttacaatcagtgaaccttcattatccctttaaagccatagttcacattaggattcacttcttttgtttgtttgttttgagatggtatctcgccctgtctctcagactggagtgcagtggtgtgatctccgctcactgcaacctctacctcctgggctcaagcgatcctcccacctcggccctcccaagtaactaggaccataggtgcccactaccacacctggctagtttttgtattttttgtagagacagtgttttgctatgttgttgtatctggtcttaaactcctgggctcaaaccttggcttcccagagtgctgggattataggtgtgagccactgcacctggcctgtgtgtgtgtgtgtgtgtgtgtgtgtgtgtgtgtgtggcggggaggggataggattgttctttgtcacccaggctgcagtgcagtgtggcgtgatcatggctcactgcagcctcaacctcccaggctcaattgatcctcccacctcagcttcctgagtagctagtattacagatgtgtgcaccacgcctggctaatttttgtatttttttggtggagaccgggttttgccatgttgcccaggctaggagttgactcttgctgttggacatttataagttttgatgaatgtataatgacatgtattcactatttttttttttgggggggacagagtctcactgtgtgccaggctggagtgcagtggtgcgatcttggctcactgcaacttccgcctcctgggttcaagcgattctcctgcctcagcctcccgagtagctgggactacaggcctgtgccaccacgcccagctaatttttgtattcttattggagatggggtttcaccatgttggccaggatggtctcgatctcttgacctcgtgatctgcccaccttggcctcccaaagggctaggattacaggtgtgagccactgcacccagccatattcaccattataatatcagacagagtagtttcgttgccctaaaagtcctctgtgctctctctattcatgccaccctccttttccccaagccctatccactgctgatctttttactgtctccatggtttagccttttccagaatgtcctatagttggagtcattcagtatgcagcatcttcaggttggtttatttcatttggtgataagcatttaaggttattttcgtggcttaagggctttctttttttttttttttttttttttgaggcagagtctcgctctttcacccaggctggagtgaagtggagcgatctcggcttaccgcagcctccgcacccctcccccacaggttcaagcgattctcttgcctcagcctcctgagtagctggaattacaggcacccgccaccatgcctggctaattttgtatttttaatagagatgggatttctccatgttggtcaggctggtctcaaactctggacctcaggtgatccacccaccttggcctcccaaagtgctgggattacaggtttgagccactgcgcccagcatttttttttttttttttgagacaggatctcactctgttggattgcagtggcgtgagcacagcttgctgcagcgtcaacctccagggctcaaatgattctcctaccccagcctcctaagtagctgggaccacaggcctgggccaccacacctggctaatttttaaatatttggtagagacaaggtctcgctatgttgcctaggctggccttcgactcctgagctcaagtggtccccacgcctcgacctcctaaagtgctgggattacaggcatgagccaccttacccagcttcgtttctttttagcactgaataagatctcattatctggaagcaccactgtttatttattcattcacctattttttttttttttttttttgagacggagtctcgctctgtcgcccaggctggagtgccgtggtgcgatctcggctcactgcaagctctgcctcccaggttcacaccattctcctgcctcagcgtcccgagtagctgggattacaggcgcccaccaccacggccggctaattttttgtattttcagtagagatggcgtttcaccgtgttagccaggatggtctcgatctcctgacctcatgatccacctgccttggcctcccaaagtgctgggattacaggcgtgagccaccacgcctggcctcattcacctattgagtgacttttttttttttaaactttttttttttgtttgcacgttctggttgcacgttttggcaattatgtgactgatttacattaaaaaaatttttttgagacagggtctcactctgtcgcccaggctggagtgcagtggcgtgatttcggctcactgcggcccatatctcccaggctcaggcgattctcctgcctcagcctcccaagtagctgggactacaggtccgtgccaccacgccaggctaatttttgtatttttagtagagacggggtttttagtagagacagggtttctccatgttgcccaggctgatcttgaactcctgagctcaagtgatcttcccccgtgcccgggctcccaaactactgggattacaggtgtgagccacctcgcccggcctgattgattgacatttaatgccttccaagaggctgtttcactcctttcccactgagaggcaggaaaggagctcccgtttgcttcctgctggtgtgtgtggggtgtatcttgtctttgcaggactctggaagctggtgggtgtcaccaggagtgtgaatgggtctgtgtgtgtgcactttgtgggaggaatgttcataagccagctctgcttctggaagcatgagccccagccatggtttgggccaacgcaggtgccaccacggcgacttgttttcctcccttgcgggtggaggcctccgctcactgcagggctgccccacaggtctccttccgctaccactgccagctgtactccgagtggagaaagaccaaccagaaagttcgcctgaagatccgggaggcggacagccccgagggcccccagcattctccactggcagctggactcctgaagaaggtggcagaggagacaccagtatgaatgctgggctctccggaccctgcagcagagaggccagaggtagctggtgataccctgtcctgtggaaggacttccacttcaacacttccacttcaacagttcccgcacggcctgaacgcttcttaggccaagagacaccatgcagagcctagtctgtgatcctgtgtgaagatattttcagggtttttttttttttttttttgcatatggaggacaggtggacatggtcctgagctctggacggagcaggcaccctgatctcattctgaggtccacatggcaccttctgggccagcagctgtggccggtgtatcaagggcgcccttaaagctggaacattccagcaagcttcttgcgcttctctgcacccggcaggcccactttcctggcaccctcgactttatataaaagttgcactgcgtttcaaaaacccacccctgaatgaataaaaggagccctggctggacaaaatggacttgtcagttatgtttctcaaaggaggcctcccagggagggaccacatggaggtaaaaaaataacactggcggccagccaggtgtagtgactcactcctgtaatcccagcactttgggaggctgaggtgggtggatcacaaggtcaagagatcgagaccatcctggctaacatggtgaaaccctgtctctactaaaaatataaaaattacttgggcatggtggtgcgcgccggtaatcccaggtgctacacaggaagctgatgcaggagaatcgcttgcacctgggaggtggaggttgcagtgagctgagatggcgtcactgcactccaacctggcgacagagagagactccatctccaaaacaaaacaaaacaaaacaacaacaaaaaacactggttggccaggcacagtggctcatgcatggaattccagcactttgggaggctgaggtgggcggatcacaaggtcaggagttcgagaccagcctagccaatatggttaaatctcgtctctactaaaaatacaacatgagccaggcgtggtggcagatacctgtagtcccagctactcgggaggctgaggcaggagaatcgcttgaacccgggaggcaggggttgccgtgagccaagatcgcaccattgcactctagcctgggtgagacagcgagactctgtctcaaaaaaaataaaataaaataaaaaacaataaaaaccactggcttgttttgagggatctgttctgaagcccatgggaagaagcaaaggctcagtcttcaagtaaaaatcaggtagcagggttataaaaatgatttttaaaatatacatacgggctgggcatggtggctcatgcctgtaatcacactttgagaggccgagatgggtggatcacctgaggtcaggagttcgagaccagcctggccaacatggtgaaaccccatctctactaaaaatacaaaaattagctgggcgtggagacgcacacctgtaatcccagctactcgggaggctgaggcaggagaatggcttgaacctgggagacagaggttgcagttagctgagatcagttgcaccactgcatttcagactgggtgacatcgtgaaactctgtctcaaaaaataaaaaatagaaaaataaaatagacataagaacaatttcctcttactttgcatctgccagtccacagaccatgctggcctctgtttttctttttttgagatggggtcttgctctgtcacccagattggagtgcagaggcacaatcacacagctcactccagcctcgacctcctgggctcaggcaatcctgtctcagcctccctggcagctgggacaacaggcatgcaccactgcgcctagccactgttagtttttagttaagtgtagagagtccagcatgggccaggcctggtggctgatgcctgtaatcccagcattttgggaggcttcggcaggaggatcagttgagcctaggagtttgagaccagccttggcaacatagtgagaccctgtctttactaaataaataaatatataaatatatatatattagctgggcatggtggcatgcacctgtggtcacagttactcaggaggctgaggtgggaggatcccttgaatccaggagttccaggctgcagtgagctataattatacttctgttgtctattctaggcaacagggcaagaccctgtctctaaagcaaacaaacaattttttaaaaatggtgacaatatccacgctgacttagggtgactatagattaggcatagttccgagtctctccctcctttgactgtcacttgttagggaagaagtggttattacctacattttacaggtgagaagactgaggcccagggcagggaagccttaatctaaggtctcagagctgtaggaagtggagccggggtgacaccaggactccttttggaggaagactcaggaaagatgcagaatacgtgtttttttttttttttttttttttttttgaaacagagtcttactccatcacccaggttggagagcagtggcgtgatcttggtgatcttggcttactgcaacctctgcctcccgggttcaagtgattctctcttgcctcagcctcccaagtagctgggaccacaggcagctaagttttgtatttttagtagagatgaagtcttgtcatgttgaccaggctggtctcgaactcctgacctcaggtgattcacctacctcggccccctaaagtgctgggattacaggcgtgagccaccgagcctggcccagaatgcagttaatctaataacaacacctacttcttcagcgctttctgcctgccgattcttttatatttaaaggctcttggcatctgtctgcttttaaagctcagggcaaccctgaaaggtgagttctggtgcctttctttctttctctctctctctctctctctttcttttctttctttctttcgacggagtctcgccctgttgcccaggctagagcgcagtggcactatctctgctcactgcaacctccacctcccgagttcaagcaattatcctgtctcagcctcctgagtagctgggactacaggcgccaaccatcatgcctggctaatttctgtatttttagtacagatggggtttcgccatattggccaggctggtattgaactcctgacctcaaatgatccacctgactcggcctctcaaactgctaggattacaggcgtgagccaccgtgcccagcctggtgcattgcatttcttattatccatattttcagttaagcaaactgagcctcagagtggaggagctgattgctcaaggtctgttttccatatgaatccctgcctggtatgtagctcactcacaaaggaagaaaaactttctgcctggactggaagggcaaggagaagcctgtgtggccatgggagtggaggaaacagctaagcacaaaggcccagaggctggaaactgcttagcctgtaggaagagcagcagggaggaaccccagggctggagcagtgtgattgaggggcaggtggctggagagatgggcagggcctcctaggcatggggtgactgacgcaccagtggtctgcaaaaacggagcatcacaccagtgcgcatgagctctcctgccccttgggggggccttccttgctcctgcagctgaactccctacacagcctgacacccatctttcctcaggccaactttggcctgtggtgccccaggagttgatgtacagatgcctcaggacatgccatgaggaagagagagacgagatggggtgactcatgcctgaaatcccagcactttaggaggccaaggcaggaggattgcttgaaggctgggagttagagaccagcctggccaacatagcaagaccctgtctctacaaaaagagaaagaaacagagagagagagaaggaaaagtgttttctttgcaaatctattctaatactttcatagagaagagttttagtttggtgttaacctgtctttaataatcctctaaggaccagcacagtggctcacgcttataatcccagcactgtgggaggccaaggctgtaggatcccttgagctcaggagttcgagaccatcctgggaaaaacggcaagaccctatctgtaccaaaaaataaaaataaaaaattagccaagtgcagcggcgtgcacctacagtcccagctacttgacaggctaagcaggggaggatcgcttgagttcaggagttcaaggttgcagtgagctatcatttacaaaggtagattgaaatattattgataggctgggcacggtgactcacacctgtaatcccagcactttgggaggctgaggtgggcagatcacctgaggtcaggagtttgagactagtttggccagcatggcaaaaccccatctctactaaaaaatacaaaacttagccaggcgtcgtggtgtgcacctgtaatcccagatacttggaaagctgatgcagaagaatcgcttgaaatcaggaggcggaggttgcagtgagctgagatggtgccactgcactccagcctctgtgacagagcaagactgtctccaaaaaaagaaaaaaatatattattgataatcgctgcattgaaggccaggcgcagtggtttacgcctacaatcgcagcactttgggagcctgaggcaggcggatcacgaggtcaggagttcgagaccagcctgaccaatatgatgaaaccttgtctctactaaaaatacaaaagttagccgggcgtggtggcatgcacctgtaatcccagctactcgggaggctgagacaggagaatcgcttgaacccaggaggcggaggttgcagcgagccgagatggcgccattgcactccagtctgggcaacaagagcgaaactccgtctcaaaaagataatcgctgcatcttactgcccaagttgccacaagcacacgtaacatctgatggtgccaattcgactgtctgcacttggaaaatggcacattggaggctgcacagcaccataaaactgatgccacgaatgcacacaaaaataagaccatacagcattatgcctagtacagaatacaccctgaattctgtcacagttcactttatgcaacattgcaagagtcctctcgctctttattattatttttaatttttttgagatggggtctcactctgtgaccaggctggagtgcagtggcccgatcttggctcactgcaacctcctcctcctgggttgaagcgattctcctgcctcaggctccccagtagctgggattatgggcgcctgccaccacacccggctaatttttgtatttttagtagagacagggtttcatcatgttggccaggatggtctgatctcttgacctcgtgatccacccgccttggcctctcaaagtggtaggattacaggcgtgagctgccgcgcccagccattaattttttttttaattttgtttttaacttttaggtttgggggtaaatgtgaaggtttgttaaataggtaaacacttgtcatggaggtttgttgtacagattatttcatcacccaggtattaagcccagtactcaatacttatctttttgttttttgagatggagtctcagtctatctcccaggctgcggtgcagtggcgtgatctcggctcactgcaacctccggctcctgggttcaagcgattctcctgcttcagcctcccgagtagctgggattacaggcgcccgccaccacgtccagctaatttttttatttttagtagagacgcggtttcaccatgttggccagtctggtctcgaactcctgacctcaggtgatccgccgcctcggcctcccatacccaaagtgctgggattacaggagtgagccatcgcgcctggccccattattagtgaattttaacagttttccgtttcttctggacgaactgtttgcaattataatgcgaattacggataatactctgatattattccatgccgttccgttgttgcctacaaagttcgcgctggagaaccgcgcaattgcgttacaaaaagaaaaaaatcacacaaaaagacacaatgttttaagaaagtttacgaatcgtgtgccggaccgcgggttgaacaagcttcatctaaaacttccaggaatctctagacaggatcattgcttcccctctgctccagctctggttacagaaagctgagagtgactaggtctaggtgtttgtgtggggtggggtggggagatgcctcctctatcggactcagaggacgcgcgccgggaacagccagtcggtgcctaacgcgagtgtatctcgagagagaagcgatcaacagctgccggtctgcgcctgcgcgcggcgggggcgtggcccggggcgagtggggccaaggaggcagccgggagcggcgggcgcaggtgttactggttgcgtcgggtcacgtgggcgcgcaggcgcagcgcggtgcagcccgttcgctcacacaaagcccagacgcggagaaaatggcggcaggggtcgaagcggcggcggaggtggcggcgacggagatcaaaatggaggaagagagcggcgcgcccggcgtgccgagcggcaacggggctccgggccctaaggggtgagtatcccacggtcctttgccacgggtaagggttcctctccgcggccgacgcgggcggcggctccgttaggtctgttggcggcctagccccggcgcggcctcggccccggctgttcccgtaccgcctgctcagggtagcggcgtctagggccgtgagcggggagccgggggagcctccagaatcgtcccctacaccgggcctcgagcctcgccaccctcagtccctccaggccggggccaaccccgtagtcgaggcctcaggcccagctgctgcgcatgggggttgatggcgcgggcccggaccggagagcctccgaggcctacccgaccgctccccgggagggtgacctcgggggccgggtttcagccccccgtcccctctcctcccggggtctgttttctgatccgtaacgtggggggaggagagagggtgcgcgcccgggaggcctcgcgcgcagtcagcccgagtcaacggtaaccgagcgagggaagcgtcaggaagggccgcgaagccgggtcggggggctcccctcctgccccgccccttagtccccgcgcgccgaccgcgctccgcgggaagtgcctccctcggaaccgcccctcgccccacgctctggccctggctcaagtccctcgccgtttcccgctcctcctccccgggtgcgccgcaggtattagtggagagatgggatctgctgcttagcgttcaccctcggaagcagacagatacgaagtcgggggaggaatcccctttttcccgtgtttcggggaagctgttctgtcaggaggcgggttcatttacttccagacttcatcagcttttcgagtcctgcttggggctctttgactccttggcttttaaaagtttctttaaaggaggaagcatcgacttgtgccccggtgaaactcattcattctgattacagacacttaagagagacagagaggttttggctccaagatcagcggccgggaaggaaggggaagcctgggtacacattgaatttcccagacatttatttcattgtggtaaaatagacataacgtagactttgccattttaaccattttttaagcgtataattcagtggcattgagtatactgactcagtgtgctgtaaccgtcactgcttcatgtccagaactttttcatcatcggaaacagaaagtgtagctattaaatactaactccctccgttttctttcctttctgtctgtgactttgccttcctcatattgtaatgtgtgaagcttagtttatggagattaaaagtgaatgcggttgagcacttatatatttaatttttttctttgagacagggtctccctctgttacccaagctgggatgcagtggcacgatcacagatcactgcagcctcgaactcctgggctcaatcgatccttccatctcagcctcctgagtagctgggatcacaggcgcggcaccaccatgcccggctaattttttgaagagaggaggtctccgggtgttgcccaggctggtctgaaactcctgggttcaagccatcctcctgcctaggccttccaaagtgctgaagttacaggcatgagctactgcgccctgcctagttgagcgcttaggttaagaacgttccctaagtgctagctatattggtagataataaatccggagaaaattccagattctttccctccttaagtagggagaaataaaataccatggttactggcccttagaaatgagaaaaacttcctctattcccagcattttactattgaaaactctgggaaggaatgtgttaattttgactttttcagcgtctatctacggaagctggtaggatttctgagggtggtatttggagggctttaagataaatttatttaccgtatgcaggaaggagtgctggtagaaccttgctagatgatagggtaaattaatagattacaaattttcccttttcccctgtccattttcaaatagtcattttgtgactgagtcattttacaaatacatgtggactgttggaacctgaaaattgtagaataaaatagccgttgtgagaaagaggctcaaagtctcaaagtctagtactagcttcatagaggatagtttaggaagctggcaacacttggatatttttgatagggcctgtggaaaacttttttttttttttttcattacaagtcttaaggaaatctctttagaagcctatacttttgcactccatgcagagtggagaggccattaacatatttgtatgttatgtatgttatgtaattaccataacataaggtaattatgctgtgatagaagttagtggagttgcttggtagaaagaatggaggaggtgacctccgccacctgctgggggcagggacctgttcctccatgacaggaagacgtgtggaagtggaggagaagaagatggttggggaggggcagggaagagagtatccaaagagcagagatttgagtgtatgctttatcgagaactgaagttgtgctgggtgtagtggctcacacctgtaatcccagcactttgggaggctgaggtgagaggactatttgagctcaggagttcaagaccagcctgggcaacatggtgaaaccctgtctctaccaaaaaaaagaaaaaacaaaacaggctgggcccggcggctcacgcctgtaatctcagcactttgggaggccgaggcgggcagatcacgaggtcaggagatagagaccatcctggctaacacggtgaaaccccgtctctactaaaaatacaaaaaattagccgggcgtggtgccgggctcctgtagtctcagccactggggaggctgaggcaggagaatggcgtgaacctgggaggcagagcttgcagtgagccgagattgggccactgcactccagcctgggcgacagagcgatactccttcttcaaacaaacaaacaaacaagaacactgaagttgctatagagttttaaggttggagcactggcagccagctgatgggcagtgaatttggatttttatcttgaaagcctttgagagacaggagaaaaatagaaacttggttctttggaattctttctctaccaggagtggagtgtgcagtagaccacaaatgcagtgagctagcaagcttgatctgggaacccaggttggaaatcttgttttgcagttacttctctcctgggtgtgagaataggatttgcttaattttgatgagaagtctgttccaattaaagtcagcaaagattcagagttagggtatagtcagggaaaaaaaagttcattttaggggaatgtataggtttttaaaatttttttaaatgtagtatcatatataaaataaatgacttaacctgctccccttcctgagtaatttttttttttttttgagatggagtctcgctctgttgcccaggctggagtgcagtggcgcgatctcagctcactgcaagctccgtgaaccgcttcccgggttcacgccattctcctgcctcagcctcacgagtagctgggactacaggcgcccgccaccatgcctggctaatttttttaatatttttttttagtagagatggggtttcactctgttagccaggatggtctcgatctcctgacgtcgttatccgcccgtcttggcctcccaaagtgctgggattataggcgtgagctaccacacctggccccttcctgagtaattttgtgggtgaataagaaacagatggattggttatttataaaaataaaaatatatatttagggtagattcctgaggaggtactgttagagttgactccatttgacaatcaagaaaactttcgttttaaacacttaaacccaggttcaggaacctgacctaaagactccaggggaggccctcctgactcccaggcagcttgctgctttcatgatactaccttggtaaccactcagtaaacagccgtttgaattgttttatttaaatcagattctctatacaatgcatttgagtgtttgctgtactttaaagagtgattgtttattcaaaaaggattttggagacacgtcagattgtgagctcaagattagaagacagggttttggattatttgaatgcatgctgccaggcctttgctttcactcagctctttgattttattctggttagggaaagagatactagcctgcaaagattagcttgcttgtttttttgggagggggggttctccaatggacttccccattaccatattttgcagtcatagggttgaaagctaaattgtccctttgctagtctgtaatgattatgatgcctaggttttctcagccttggctctggtttgctagttttaaagcctgaacagtagaaggctaggagtgaatcagtccccctctctacccttctcaataaaattattggtagaaaaatacatcattgcctcactgtgtgctaagagtctcttttttttttttttttgagacggagtctcgctctgtcgcccaggctggagtgcagtggcgggatctcggctcgctgcaagctccgcctcccgggttcacgccattctcctgcctcagcctcccaagtagctgggactacaggcgcccgccactacgcccggctaattttttgtatttttagtagagacggggtttcaccgttttagccgggatggtctcgatctcctgacctcgtgatccgcccgcctcggcctcccaaagtgctgggattacaggcgtgagccaccgcgcccggcctaagagtctcttttaaagctgtaagcgtgtaggtagtagcctccataggaccgaggcctagtgacgacatggtgaccccagctcttagccacatgcagtactgcttccctagatgagctgctttttgttttgccattctttgttgattgtcacagtgtccctctgagctaccatgcatacaggttgcgctggttttgctggtaaagcgctagagacagaaagagcttgagtcatgtgggtagttcagtggtggccttggagctggaatggtgctgtgaatagtgctctccacaccttacatgcattagagcagcgcaggacttgagggatttctgtgaagaatcactttatataagggatggttctcacacgggcagaggggtccttgtccctcaggagatgtgatcacaatttcagggtattgggattgccatttcaaactgcaccctttccttgattagaaactccaaaagtagtgagtgttacgcatgggaactgcatggagaccttaagagagggtaggcagtcactatttggtggtggtcttttgcagattaggcactcaatctttttattagggtttttttgttttttgagatggagtttcactcttgtccctcaggctggggtgcagtgtacgatctctactcactgcaactccagctcctgggctcaagcgatccttccacctcagccttctgagtaaataggaccacaggcacatggtaccatgcctagctaatattttgtagagatggtgttataccatgttgcccaggctgttcttgaactcctgagctcaagtgatccgcccaccttggcctcccaaagtgctgggattacaggcattaatcgtatttttaatttaatttaattaattattattattattattttttttttttttgagatggagttttgctcttgttgcccaggctggagtgcagtggcgctatctcacttcactgcaacctccgcctcccgttcaagtgattctcctgcctcagcctcccaagtagcgagtagctaggattacaggcacccgccaccatgcccggctaatttttggttttgttttgttttgtttttgagacggagtttcactcttgtcgcccaggctggagtgcaatggcataatctcggctcactgcaacccccgcctcctgtgttcaagcaattttcctgcctcagcctcccgagtagctgggattacaggcgcctgccaccacgcccagctaatttttgtatttttagtagagacggggtttcaccatgttggccaggctggtctcaaactcctgacctaagataatccacctgcctcggcctcccaaagtgctgggattacagacgtgagccaccgtgcctggcctaatttttgtatgtttattagagacaggtttccaccatgttggccaggctggtcttgaactcctgacctcaggtgatctgcccgcctcggccccccaaggtgttgggattacaggtgtgagccaccgcgcccagccaaaagttaaaaagacttgcagagttaagtttttatatgtacgtatacatatacatggactagagaagaatcttcccctaattttgtcctgaagatagtgagaaaataggattggacatgttaaaaaaagagcttttcaggacatcacttttatactatcacatcatctaaacttgaatatgtccctccccttccccttccccttcccttgccgagacagggtctcccgctgttacccccggctggagtgtagtggtgcaatcatggcttactgtacccttgacctcctggagccagactgtcttctttctgcatagctgggaccgcagttgtgcaccaacatacctggctaattttttgtattttttttgtagggacacggttttgccatgttacccaggctggtctcaagactcctggattcaagcactcagctcacctcagcctcccaaactgctgggactgcaggcatgagccaccatggccagtctgcttgaatatgtgtctcgaatgatatttctttgagggtcattctctacaagtctgtcaagaattagttggtggtggtagatttccaaaaaggtcaattttttaaaagttggaaatgacaagagatagttctaatctctttactgaggaaacctctcagagggaatgattagccagggaaggatttgtttgcagaggtgctgtgcccattaagcatggtgagagccgctttctcaatggtgagtcatgtgatgtggattaaccccaaaccaaatgctcagcttctgtggttagattggatagtttattcgtagccatggtatgcacctgtggaatataggttagacactttgttacctgctttggctgtaattatttatttatacatttcgtagtttataggtgagcttaagcagtctggtgaaagactggaaataattcatcatggactctgtcagaatgttttttattgtaaatcttaaagtatttgggacttcaaaagtaacaatattaaaattcatttccatctgtgaatcctctggtggaccatgatgtgtagattctgttatgttttatgattttttctaacacagtcgtcgtcattttccaggaaagagtaggagatgatttggcagatagattttgtttggcagactttggtgaaggactttcttttggagtagacaagtggcctgggtaacagttgtaggtctcctgtgggacctgctttgtggtgtgaagccagtcttgtggactcaggtagattgcgttctaggcatctagggattggagctgccataacatcaccttatctgccagcccgtgggaagggaagcctgttgattgtgtattggtatagttgagagatcacagaggaagctgctttccttggttttaccttgtgttgatttgggtgtggctcacaccagtgatacctctgctgggataccacttggcactcttgtgtttggggactacacaaagttgctgactttaaaatttttccaagtaaatacgttactatttttgagacagggtcttgctttgtcaaccaggctggagtgcagtggtgcaatcatagttcactgcaatcttgacctcctggactggagccatcctctcagctcagcctcctgagtagctgggactacaggtgcacaacaccacactcagataattattattatttttaaaaataaagacagggtcttatttgtcgaactcttgggtttaagtaagattctcctgccttgacctcccaaagtgctgggattataggtgtgagccaccatacctggtctcaagtgaatacttttgtttgtttgtttggagacagagtctcattatgtcactcaggctggagtgcagtggtgcggtctcagctcactgcaacctccgccccccgggttcaagcgattctcctgcctcagcctcctgagaggtgggattgcaggcatgtgccaccacgcccagctaatttttgtatttttagtagagatggagtttcagcatgttggccaggctggtcttgaactcctgacctcaagtgatacacctgcctgagcctcccaaagtgctgggattacagatgggagttaccacacctggcctcaactaaataacattttaaaatagtagcttctccagctactatctggtgtttcttccacggaagaaagttacatcccagaataaagatcggctcttcagttaaagatacttttataaatcattaatactgtagtcttggctttttggttttttttccggttttgtcatggattacaaattctgtagtagagcccgtggtctgggagtcactggattctcactggcgggacacacagggctggggaagcagaaggtgcaaggctcagttgcttaagaaacttgaggtggcttctggctcctcacttgttcctgatcagctctaatctgtgcctccctgtagtcagaggggttgcgcttgagctggcagctgaggaaagcgccctgtcagccagtgcccgggcttccaagcctgatggctgctacctagagatggttagtgttaacagtgtggtggcacctagcacacaaaggtaaagagtgcaatgggaaggccgtgccagaaaagcagccacccttctttgccaaaggtgggattgtctgcatgctgtcttccacctcccagggttgctcagacccaagtttcccagcttcaaagtagtaggattgtgtagggagtggtttcttttccacctttctggatttttaaaaagtggttaaaatatacataaaatagaccattttaaccatcttaagtgtgcagtgaagtatgatgttttgcagcaatctgcacattcctggaacttttattctcatcccacatgaaattctatgctcagtatttaataacttcccatttctacctccccctaggcccaggtaacctctgttctactttctgtgtatggatttgcttattataggtatttaataagtggaatcatacaatatttggccttcagtgactggcttatttcactgagcataatgccctcaaggttcatgcatgttgtagcctttgtcaggatttccttcctttttgtggctgaataatatcccattgcatggatagtccgtgttttgtttattccattcatctattggtagacacttggttgtttctaccttttggcttgtgtgagtagtgctgctatgaacattggcatatgtgtatgagtccctgcttttaattcttttgggtgtatacctagcagtggaattgctgggtcatagtaattctgtgtttaattttgagtgactacctaacttttccatggcggctgcatcattttatgccccccccccctttttttttttaacactatgaaagacacttatttgtgaagctaaaattggatgggcctatgtgtactacctcatatttccattctatgaagtcttagaaatcatccctctcttctcctgtttctgtcttggaattaacacaccttggtcagggagttggcctcaccattgtctctgttactgtccgtaggagtattttgtgagcccaggaaggtgtacctttccttgggaatgctttctgccctgtggagccttgagtttgaatgtcttaattcaaaaccaacattagtcttgtctttgctttttttgagacagggtctcgctctgtcaccctaggctggagtgcagtagggtgatcatagtttgctggagcctcgaactcccgagtttaagtgatcctcccatctcaccctccctactagctagtactgcaagtgcaccaccacacctggctaagttttatatatatttttttgttgttttgacagggtcttgctatgttgcccaggctagtcttgaactcctggcctcaaatgatccccccttcttggcttcccaaagtgctaggattacaggtgtgagccaccgcatctgaccaatactagtcttgtgtcatatgtaactttgtgtggaattgtaaacctggcaaatcaaataattatctttcacattgtgctgacatataaaccctttacctttttttcctctctctcgaattcagtgaaggagaacgacctgctcagaatgagaagaggaaggagaaaaacataaaaagaggaggcaatcgctttgagccatatgccaatccaactaaaagatacagagccttcattacaaacataccttttgatgtgaaatggcagtcacttaaagacctggttaaagaaaaaggtaatggtactggtgattgagtagggtgagaaggttggtgtgtcatcttttctgtggctaattccttggttatttttggtcagtggaagcggctctgggtagagcatgttctttccaggcttaagagtgaagcccccttaccccacctcagttttttttttttgttttgtgttttttttttgttttgttttgttttgtggtcatacccctgtgtgtcaaacaggatggtttgtatggtcctttggcctacagatgattttactggcttagtatggttaataaggcttcgattaggcttccggggagccttttcgtgttgaaattttttgaattttgcacgttaggtgggagagatttttcctttctttccttttttttttttttttaagctttttaagtttcacaggaagatagcttgtttaaaattttgtggatgtcttcctgggatcaaaatgtggtagctggaccttatgcttctcagattccaaactataaaacattagcttgtattttaacttttaggctttttcccctctgggaaaaaatagagtagactggccattggagagctcaaaataaggtatctgctttgtaacgcggtgccttaggatgtggattgtcatagcctaggtgtccaccttccagccgagggcaggggaagcagccaagctctgctgccaccaggaggcccgaggaggcctgcctctgtgatcctcacccccgtgcacactgtggtgtcctctctctctccttcttccctcctgtgctgctatcgtcttcctttctttcctgattcttggccctgctggtggcacttaggactaaagagactgctcagccctgggttagacaacaccgtggtagagaacaatttgtatattgccttgaggcgccctccccgcaccccgacctagactcaaactacccttcatggagtctttgcatgactgaaaggtattggttttctggagcattcattatgaaaagagatgtgagcttgatttgtcaaatgatttaacatttcagtgacagagatgccccgtggataggccattttggtatgtgtactggtgctccctgcattggattttgaaattatgaatggcactgccatcattgtcccatcccttattttgaccatgacatgcaagaagcactaggcactgtgaacctctccgtacagtcacgcgtgctgctcccacgtggcatttctccagataacacagatggaaaaacgttttggtgtgagattgatgtgcctgccttgatcagccaaatcattcctgccaatgctcctagggcaagagtgcagtttcttctttttgtctgagggtgtgtcatgctgcatcccagatgcagtgttcttggtttttgggactgctgcttcaatagaagcttagaatttctgtacagtacagttgggcctcattcgaattagcttttggaataacctccaaatttgtgttctcgtgatttggttgaaccgctgaattgctatttccattgataataaggtatagtagttccaagaaccaggaatgtggctttgaaaatgcaattgttagaattttgtaagagattgcaggccaaattattttttcatttttaggagtgtgtgaaccagttttgggacatgctggatgaagtaggtgacatttttactgctttaccattcagtaattcggtttgggaaaccttaaagctggtagtagcagcagcagccatggtgtttctggatgtagaagcagttcacctcaattcactattttgcactcttaagtgtggagccagcctggtggttgattgggatacttccaaactggttctcatattcccctggcatactgctacgaatgcctgggctcagccctctcagtgtatttttggtggtgtaatttagaattacaggtgtgcagtaaatcagttatttttaatgagccttaaaatgttcttgtttagagctcccctgtactggttaaattaattactttgctgtttaattaaattattagcggtataggattgtgggtaaagtgactcagaaaggtaatctttttatgataatgcttatattcagtatgtgaggtctaaagaaatttactgtgtttacatacatatgacttcttaagaaatactcttcttattacgtgctttcaaaaagacgtttttattcccgttttggtgtacaaaaaatgtttaagtggttagtttaaatctgaaatatttacttgaaatttgttgcgcataagttttaagtgttttgaagactttatacataggaagaactggcagatagaggcacttacaaccctaaaagtattagtctcaattccaaaacacagagatctgggctgttgtaacctaagcactctttatcagtctgtgttttaaggtctgatgaatcttagccttgtttcaggaaatgagtagaacaagaactggaattagttgtcctcaactgaaattttctgtcattatagcactatctaattgcagcctctcagaactaaagtagctagctttgagaggcccaagaggggagctttttttctaaggatactccggggggagattgtctcacatgctcctccctcactcttgatcctcttccccatctttcataccagctgcatattctccagctttaattttagcatttagcagcattctagcatttcctattaaaaatccacataggaagtaaactggtcatttatgcctttgaaagtgacttaacaggccacagctccccaggttgtatcctgacaggtaaagggatacacatcttaaagtgattgaccataaggactgggtggaaaaaataaagatttctgtgagaaaaggcgatcttaggcttttaaacttagtgtcgtgctacatttgtttgagaccaagtcctgtatgagtggaggaagctccttgctgggctgcttctcttgacctcaccaggcagccggcagcacccaggtggggcagtgccaccagagcaggactgagctgcacctgcagtgagtaaatagagcccaggttgaggaagaaaggaaggtcagggatgtagtttaccctcagtcgatccgaagtttagcagcagtcagttcaacttgtgtaagcaaagatttcttttaagcacttaatccttctgttagtataatacaccactttaagtaaatttcaaattgcatctgacagaaaactaaggcccagagggcaagtgtagtccagtagaaaacctccatcttggctcctggagataatttgcattgtgggtctattaggcagaactgtattttcaatttaaatgatattcctacccagtctacttgcttcttcatattttcctctgttggaaatgcagcctgtattttatttattttgtttttgagatggagtcttgctcttttgcccaggctggaatgaagtggtgtgatctgcaacctctgccccctgggttcaagtgattctcttgccccagcctcccaagtagccgggattaggcacccaccaccacgccgagttaatttttgtatttttagtaagagatgggctttcaccatgttggccaggctggtcttgaactcctgacctcaggtaatctgcctgccttggccttccaaagtgctaggattacaggcctggccgcagcctgcattttagaaaggcctgttatgctaaagcgttcatatgtatgaatacttaggttgagccccagcagtgcagcctgtctggcttaccccgtgtggtctctggtgttagggaagcagtaacgttctgttattgccacgcaattgaggagcgtgggctcagtcatttcctaacatgtccataagccaagtaggtgtgtagaataattattttgccatgtttcaaggtgtctttatattaaagagtgtgcatgtgttctgtgcactcccctcgcccaatagagtggcagcctgagaattgaccgttatgagatgaagaatgtttgacaacatgcctgactttcaagtccccccaactcctgttaaaaaaaaatatataggtcttataacatgtgaattctcttcagtgaagcttcggcactgtattccctctttttttctttttcagacttgagcagtaaatgggaacacaaaaacaaatactcatttggctaaaggtctgtgcaggagagtgaggtcacagtagctcccagggaccgcctgagttctttttgggttgctcatctgcttatcctcctgatgtgttttaagaataaggcagtctttttaataattcacttaaatgttggtcaaaaatgatttcttagagcattttaaatagaggtagataacagttggtgttagattttttaatgtcttagttttttcaatattttgatgttttaagctgcagtagaatttgtcttagcagcctactcttgggattccatgaattccatccatgtttacacagggggaggagcaaccgtattttttattaataactgtgagtgccgtttctgtaagactgctgctactgccaagctgtcacctctacccctgagtcctgactgtgtgatctgctctggatggtttgctcgttaaacttcacttcatggaatgtgaccagactgtttacttgacaaattttgccctcacattcttgtcgatagttgtactgactacataaaataaatctttgctttgctattgtagaaccaaaagggaggtggtcttttaaaggctccattttcctataggaaagtatgaattagcagctattgcagatcccttaacacttaatggatggtctctcagggtagaggttggaattttatgagtttgtgaggaggatgggcattactgatgatctcagggacagcactactcatgctggacccccgggtgactgctaaatgatgataccacttgaggtaaaaagagggagaacgttttaagcaaatttttaatacaaaggattgagtcaggtgtgctatttctagactagactgttacgtggaaaaagtcctaatttctaaacctctctttttgttaaagtggttatggccatgggaaaaagtttggtttggatttgcttggtttctgggttgcaattacagctttttgatccaagcgtcttatggacacagactagaaacttcccatgcaactgggacttgaatttcggcaacatggttgcagctgttttgaattaattattgtgagtcttttattttttaaaggttattaggtggtagtcatagctggtaggaaatcaacttggggcctcttcagtcactattttgacactatgtggcattttcatcaaagtggagacaagggttggtggtccttgaatggctgctgctcttgaaacaaatggctttttaacatggcctcagggcggctgcatttttggaactgctttactttttaagggttaaataaagccgctttgtacaactgtcccttggctgtgatcatttttcagtttgccccacaggagtacatactctaaaagtaaattgtactgatccctcatatttccgttcttcatttctttgcactgatgattctcctgttttgtacaaagtgtcagtttcgttctgaaacatttcaggagaggacaaagagggtgaggctctagatgtaaactttggacacttggctttcttgccttcaaccaatgtgcagagccattaataaatatgtccttcagatctttaaattttttgtaaaataattttaccttgtttttcattaaaaatttttcttcctatagcctcataattttaatgtcctttaaacaaaagagttggaataggcatgacttgttgaggccgttaagcgggttatttttacccttgtactgctaaaccaaaccgatccagaggacaacaaaagcccattttttgcctttggagagtctggttagagatagttttctccagggtaacactttacatttgttttctgtgtgccatcttcaagttcagcagccattttggtggttgtcttgatggattctaacatctggtcatggtggtcatgaattggcaatccaaaccttgaggaaaatctgcagaaacttttgaaatgctttggttttttcccttttgtgtagattagaatcatatgagtctgtttaactgtttagatacaaaatctgagccctaaatttgaatttatttgtgtcctttaaatggggaggtttagaaagcggcaagaatgaagcctggcctaattcactgaagagaatccagatgctgctctggttttgtgatcttattatattcaaacattctgcctctacagatgtggagcctagtgctgtgtgcaggaccagctatagaatttgtggggcccaacacaaaacgaaaacaaggggcctcttgttaaaaaaaaaaactaagaatgtcatggcagcgataacagcattaaaccaagctcagggcccctgagtgcggggctctgtacaattgcacgagttgctcacctgtgaagctggccctgcggccgtgtgtgcctgtgagcttataccttcgcatacgtgcgtccttgtatttatagcatgtgagctcagcccgatggcatcgcaatttgtatgcatttcacctgcttgccaccaatgagagcgtatgtgtaaaacctcctcccttccccagaaaagtaaatcacgcagacttctttcctatagatttggattgcctctagtcatgaatgagtcttccagacagggaaattgatacggaaatctgtggaatagcttgtttgtggtgggaggaaaatcaaggacatattgttaacgtgttttcacctacttttactgcacacctgtaatgcctagttcggtggtttagagaatatggagtgtttctgggctttcttataaggcagaggctccatacaaggttgctgatgattgttctaaattcccattgttttcttggcttttctcccttggtttatgtgtcgtctggaaactgatttgtagttggtgaggtaacatacgtggagctcttaatggacgctgaaggaaagtcaagggtaagtgtctgagagaatttcttctgtggatttactacatgaaaaatgtaactgtatggtggcgtggaatcgaatgaaatcaggaaggcagtgagtgctcatgttacagtagctatgtttgattttgccaaacatttgagtggggtgggaggggatttgcaaatgggagtcccgcttttccaaatggctggccaaagagctttttggtattctgtttggatgcccaatttggataactggggaccaatagcagcattgtctctttgttaacagaggaattggctgtgtgtgaattatgcatggaattttagcggtggtataattaatgtaaaacgtgtgttcttgtctagaaaatgttactcttggttgtttgctgaatttgaaagttgtgtgaaccaaagattccgaaaagttgcctttgtgccagtaaattgtaaaccaaatattaaaaacctgaatgttcaaaattggcctagtttaaagagaacataaactattttctgtcgtgcaatagaatggcttagaataatcaaaaggatgagcttaacttacggaagggatggatttaggaggaatatggtaaggactcgattgagtacagagggaagcagatctaaagttggtgtgatttcttggagaccctgaatttaggtctgcttattaaatgtcagcagctctagtgcaatgctggtaacgcgtaggagaaggagatattaaggagcccagcttttaacaaggaaggcgaggcgaggcacttctgtcagcttccccttagaagggttcattttaaaagactaactttgtgacataaatcatatttttagtttgtttataactgtcattgatatttactatttttttcttttctttttccccttccttgctcttctgactggtctctggcttcctccaaagggatgtgcgtaagtatcgtctagttacttattggtatttgagccttctaacttgtaggactggtttcactcgactcgtttccttttgactctatagtgttgttgaattcaagatggaagagagcatgaaaaaagctgcggaagtcctaaacaagcatagtctgagcggaagaccactgaaagtcaaagaagtaagctcttgcttaacactgcggatactgtgtgtaattgttgagtgatcctactttggaattagggaaagacggtcatggtcccagacggcatttacaaagcaagtgccagcctgttgtttctaatgaagagtgtcggtcatagcctacagcagccattccctgcaaggactttggggtggtggccaagcagatcctgagtggctgctgaccaccttctaatatctgtgatttgtctgaggccttgttgtctcagggactctcaaaccatgagcccgtgggtttgtgccattaagttttactccatctgacccttcttcttggcccatcttttttctttttttaaaaagtgagtttgttccagcctgggcaacatggtgaaaccccctctctacaaaaggtacaaaaattagccaggcatggtggcgcatgcctgtagtcctagctacttgggaggctgaggcaggaggatcatttgagcccaggatgtggaggttgcagtgagctgagattgcaccattgcactccagcccgggcaacagtgagaccctgtctaaaaaataaaaaaataaagtgagtttgttattcctcaaacctgctttcacatctcatctgaatcaaatatattccttgaggaagaaggtttttttgttgattaaatccctcttggctgggcgcagtggctcacgcctgtaatccccagcactttgggaggctgaggtgggtggatcaaggtcatgagttcaagaccagcttgaccaacatggtgaaaccctgtctactaaaaatacaaaaaattagctgggcgtagtggggggtgcctgtaatccatctactcgggaggctgaggcaggagaatcgctggaacccaggaggcggaggttgcagtgagccgagatcgcgccattgaactccagcctgggcagtaagagcaaagctctgtctcaaaaaaacatccctcttaacttcttttcacctcttctcttggggaggaagatgagtagattcagagtgaagcttggtagggtctaaggtctctcatgtgttatgatgtcttttttagtgctgatggtggtaattgacaggacagagagttgaagaagagagtcagtacagagcttcacagaccttcccagatgttgttttactgcgcagccctcacacacacgcctccaacacctgaaggacttgaaggatgggggcgcttgtgtggtctagaactgtttctcaaacttctggaagccattgacggggtttgcagaagttacaaaaccccattgatgaattagtaagattcagctataccaagcccatgaagctctaatttcagtctggcggttctacattatatcagctaatcatgtttccctccctaccctgcttttcttttttacttagtgcaattgagagctgtgtttttagtgctacacttcatgccttttcttcctttcctatttctttagctggactcttctaagctggtagttgagttcatttgactttcttgttaatagatttgagagatgctttccaaacaacctttcagtttctaagtcttgagaatatcatttactgtgcaagcatggtttgcgttgtactgggtcagttaaacgtaacaccttttgtgcttgttttaggatcctgatggtgaacatgccaggagagcaatgcaaaaggtgatggctacgactggtgggatgggtatgggaccaggtggcccaggaatgattactatcccacccagtatcctaaataatcccaacatcccaaatgagattatccatgcattacaggctggaagacttggaagcacagtatttgtagcaaatgtaagtaaacagaaccatcgtctaaagtagaaaatcagaactttatgaaatgaccttgtcaatatgttataaaagtaattctcacatttgagaagaaaaatgtaaagaagggttttgttcttgatttctttaaaaatcagccttataggcgggctttgtctgcattcctaagtcacaggcttgaccgtggtctcgttggggctgtgattcctgagtttcgcaggtgtttccgcaagcagtaaccgagtctgcattctccgttggtttattttatgcagttttggtgcagagtaagactgtacgagcagaagtgcactgacaccttcctcttgttgtgtctggggtgaatgataatacctccaccatctgcaaggggaaatatttttagaataaagtaggttgggtggggtggggagtggtaaagcttatcagggaaacaattttttaaaaatgttcagaaaatgagtattaatttgaagtatgaggtgacttaagtttctgagaaaagagacaatatatttactataggtacagtttatttacagtgaaggccaggctttataatcctattttaaaatttccattgcagttgattagtttttgtgacattatttcctaatacttttttccaaccaaagcatgtatcattcatgtagtaaaaatgttgtgtttcttaagatgtttacattgaggtttttaccccgttctctctcgattagctggattataaagttggctggaagaaactgaaggaagtatttagtatggctggtgtggtggtccgagcagacattcttgaagataaagatggaaaaagtcgtggaataggcactgttacttttgaacagtccattgaagctgtgcaagctatatgtatccttctgcaggaattcaacttatgaacagtttgacctaaattgctgtgttagtaatgtaggtttgtgtgaggaagaggtgactgtgtgtattcatgttttttatgtgactagggggagtgcattactgtggaattaagaggttctctgggccggaccggtcacggtggctcacgcctgtaatcccagcacttcgggaggccaaggcgggcggatcacttgaggtcagttcgagaccagcctggccaacatggtgaaaccccggctctactaaaaaatgcaaaaattagctgggcgcagtggtgggtgcctgtaatcccagctactcgggaggctgaggcacaagaatcgcttgaacccgggaggtggaggttgcagtgagccgagattgcgccactgcacaccaccagcctgggtgatagagtgagactcagtctcaaaaaaaaaaaaaaaaaaaaaaaaggttctctgggggtggaattgattcaatacagtgtggatagaggggatggttacaacatgggcatatgcccatgagtctttctactgttttcttttcagaagagtctaggtttgaaggaggaagtccaaagaatgtgctactagagagaaagtggggttgttgtttcatgtgtaatacatccttataggacctcactctttccagtgagtagacatcattttggaagaggccacttctccttgaccctaggcttagcctagagtttttaatcccttggagagtaccccacaggagcacattcatacaactcagacaagaccgtcactgcatgtcttacccagaaaacatggtccttcagtttagatagtggtagatgcctggcccattggtcacattcagagaaccttgatgccactgcttaagaggatggtttggtgaaattgtaaggttacgaatgaagcttcacacctaaggaataagcggaagttgtcttgtcctccccgccagctttatttattgttccttttatgtttattgttgaaagtataatgaagaattgaaattgctcataaattcatcacttagagggactggtagcagttggagtatttttctttctttttgtatttctcttgtgcacatttttagaattgcaagaaatagccttaattgtaataccagctatgttcaatggccagctgctatttgatagaccaatgcacgtcaagatggtaagtcagtaggatctttctctgtgatatactcaagtctagcaaaaacatggaattaataagagtgtacatatagccactatgaaatatttgtggattagtctaagttaaatagggtgcagtatgttgagcaaaattgtgagagaaataacattttgctggtcaggcgtggtggttcacgcctgtaatcccagcactttgggagtctgaggcaggcggatcatgaggtcagcagttcgacaccagcctgaccaacgtggtggaactcctccgtctctactaaaaatacaaaaattagccgggcgtggtggcacgcgcctgtagtccagctactcgggaggctgaggcaggagaatcacttgaacgtgggaggcagaggctgcagtgagccgagatcgtgccactgcactccagcctgggcaacagagtgagactctgtctcaagaaaaaaaaagaagaaaaaaaaacattttgctcatggcagctcttgactgcattagatatttttccttttgcacagttgactgttcatggcgcattcaggaagtcacctgggtatcctggttgagcaagtgatccgtttcaaagaatggttatatatgtggggttccagtttttcaaagtattacagtataatgtttggttagcatcaaatctgttgtgaacataattaagtcattgattcagacagcttttaaaggtctgttggagcacttcaatcttaataaacatttgctctgccgtaactgtgccaaagataataattactacaggcatgactggaacatgctgagggcagtctagttgggactcaaattcaggaaaaagataaactataaagcaattttttcattactctaaatagagtaggtaagttttttgaatagatgatagattcacgtgactcaaaagtcaaaaggcatgaaaaggtagtgtgaagatagtgtgagtcctacttggacttcttgcccaggtccccatcatcccccacaataatatccatgtgtcttttcccttgacataaaataggaagcatgctccgcatgcctttctacccttgcgtattactccatggcgtggataatgtgtttagctggtcctctcttgatggggggccatttcagtcttttgctgttgcaaacactgctgcactggatactgagatttgtttgttttctttctctttcaggatgagagggccttaccaaaaggagatttcttccctcctgagcgtccacaacaacttccccgtaagtgtttcagtgattagggctgagagtttgaattggagttacactaataaacagaaaattaccatatggtttcacttgaacctgtgccaggttagccctcagttctcttggccagttcttttctatagatttttcagggtgagaaatgagcagagattcacaacttgaggatattgttaggattacctcatggtaatcctaggattgtaataccaggatgtagaggatgtggttaggcattttgaaagtgtcctggggaaggaagaatcagaacctgtgaagggaatgaaaaccaggctgcactctaattcagaagatactggttagtcccatgtgggctagcagtgcacactagacatctgcacagaaattcgcacgcagatgtttgcagcaggatgaaagacacatgctgcagtgtggatgaacctcgatttcatctacaggaaatgctccgcatagataaatgcataaaggcagaaagtagattagtggttgcctgaggccgggaaggagtaagtagggacgggactgctaataaggttggatttcttttttgggtgatgaaaatgttctggaattaaatggtagtgatagttgcatatctctgaatatactaaaaaccaccgaatactttgagttttatggtatgtgaagtgtcttgaacaaataatttgtatgcagaggggaaagggatcagctatttgtgacacccaggtgaaaatctgtctcgtgacagggaaggctagttgatgggctaccacataggtagaagtggcaaatattagtgcagagtcatagataagccagaggctggaagcaagaacctcagtgcatacagcggtgggacgactcagggaatcactggcgcaggtaaagctctcctggagaagaaagatggatgagggtgagaggcctgtgtgtgctgtgctggggtgacctccaccaggcgggttgagggggcctggtctggagcagcagctcaagctcagggccctactcactgagttggatgggagcccaggccagagcacctttgcagcgtagcattatggcagcatgacagatgtatcttgaagggaaatctgtggcttcatgagaaggctcatctgttgaaaggcaacattagttagagaaggattgcatttcctggacataacatactcatttcccaaataaattgtcagtgtgctcacctgagcagtggtcaccctggaccatggcgatggctcttgttgactcttgtgctggagcaggaggaggagcacactgctccagggagcctgttatccatggctcttggtctcccggccatttcggaggcttgacttcaaagccttcagtgctttgggagagtaagtcaccgtggcgatctcttgctgctgttgctatgcaattaaagatggaatgttcatcagatgaaacgcctgggaagtggtggcaggttttatttactttttaaatgaactttgtttgctttctttccttcctttcttcctttttctttctttttgatggagtctcgctctgtcgcccaggctggagtgcagtggtgcggtcttggcttgctgcaacctccatttcctgggttctagtgattctcctgtcagccttccaagtagcagcgattacaggcatgtgccaccatgccaggctaatttttttttttttttagtagagatggggttttgccatgttggccaggatggtctcgaactcctgacctcacgtgatccacccgccttggcctcccaaagtgctgggatttcaggcgtgagccactgcgcctgcccttgttacgatttttaaaagcttacctggttgtagtttaagcctcagatggtggttaccccagatattgcaagtgtcagctcttttggctgtttccagagaccagcctgtatttctgtgtccctgtctgtgttggtagggcatggagttgagtgtgggctgggtatccagttgtgggttgggaagctttgggggaaggaagataggttctttgaatacatacattagcttcattgttactaaaaccacccagattcagagagtagtggacacccaggatgttgattggctggtttgtaacgtgttttttcatgagaaacatcctttgggctactagggattgggcacatttgtgctgcttgccacctgatgtcttgagtcaccttttttgatcagacagttctcagtccatgggttagtgaaacaaataggctctcaagaatcttagtgtgggggttgttaactttcccgtgttggttttcagccgcctttgttgtatacacacatatcccaaacgccggaacaaggctctgtttccaagtgtgccgatgttgaattttgcattgggccctgaggtcactggtgggtgggggtgggtaggctgaagtggatagctgcaactcactaaacactcttttcctttgagggtcaaggtttgctaaataggggaaaactaagcttctttctcttttctttccagatggccttggtggtattggcatggggttaggaccaggagggcaacccattgatgccaatcacctgaataaaggcatcggaatgggaaacataggtcccgcaggtgagaatgacagtgcaccttgcttggtggtttggggaagtgaaaattattaattattgggacaactggactttgagtagtttaaatggaataaatatttaactgggacaaaattccctccttattcatctctgcctcattttgaataaaggcagtattttgtatttttatcaagttgagtcattttttaaaaagtcattatgctttttcattgtaacctgacaacaaccttctaagctgaaatagttgtgccatttgataagaggaggcaagccagagagttgatcttgctcaaggtcacactgtcagttactgacaggctgcaggtctcctgaccacgggaccatagcactgccgcagtgccctgaaaagtgtcttaccaagacccctttgggccctcctggtgtttgcacagctgctgctagagagctaggggcattgatagatgcaaaaaaggtggagaggccaggcacggtggctcacgcctgtaatcccagcactttgggaggccgaggtgggcggatcacaaggtcaggagtttgagaccatcctggccaacatggtgaaaccccatctctactaaaaataaaacaattagccgggcgtggtggcgcacgcctgtaatcccagttactcaagaggctgaggcaggagaattgcttgaacccgggaggcggaggttgcagtgagctgagatcacatgactgcacttcagcctggcaacagagcgagagtccgtctccagaaaaaaaaaaaaaaaaaaaacctgcatgaaagctttgatgtgtagaataaactcaggctttgctgtttagcattttcattgctgtgtaatgatgtattttgattctattaaggaatatgtcatttttatgaccttagactttggtctttgttggaatcctttgaaattggaatatggaagcccctctatcccaccattgtcagtgttgcatatccctagactctcttccagagtcaccctggggctgacttaaattctgggccacaacttcaaatggctgttaacgtttcccccgacccaaaacacacacaccccatgtctgacatctaaacagaaagactgggggttggggaggaagtcttggtgtttttaggaactggtttttattttgaagattttacctttaacagggattgatttattgagacggaattttgctcttgttgcccaggctggagtgcagtggctcaatctcagcttaccgcactcaatctctgcctcctgggttcaagtgattctcctgcctcagcctcccaagtagctgggattacaggcatgtgccaccacacccagctaattttttgtatttagtagagacagggtttcaccatgttggtcaggccgggctggaactcctgacctcaggtgatccacccgcctcggcttcctgaagtgctgggattacaggcgtgagtcaccacgcccacccttaacagggattcttaaaaaaaatctacttctgttccctaaaattttctaaaaagtttatgttccatagaatgtgtcttataattctatttcatgtttaatactgcctaacttgaggcctggtgtggtggcttatgcctgtaatcccagcaatttggaggccgagggtttgagactagtctaggcgacatagactccatctctacaaaatataaaaaaaatcagccaggtgtggtggcgtagtcccagctacttgggaggctgaggcaagaggatcacttgagcctgggatgttgaggctgtagggagctgtgaccatgccactgcattccagccccagtgacagaaggagaccctgtctcaaaaacaaaaaaaacacaaaaaccctgcccgactgggtcattaaagtatgtagatccctcagaaaaagattagccaggcgtggtagcaggcgcctgtaatctcagctagtcgggaggctgaggcaggagaattgcttgaacccgggaggtggaggttgcagtgagccaagattgtgccattgcattccagcctgggtgacagagcaatactgtgtttaaaaaaaaaaaaaatagctatatgatatttgacagttgaaatggtaagggctttttttcttgctgattaaaatatataaaatatacttgtcatcagggattttcttttgagttcttttgctggtttggaattatgctttttaagttcaaacgttatttactgctttgacataattttagtttgcattgactttttctttttaaggaatgggaatggaaggcataggatttggaataaataaaatgggaggtaagaaatttaaaatgaagtacaagcataatcacttttaggcatagttttctctctttcctcttttctttcttgtttaaaccctgcatgaaattctctttggtttcagtttgagtctagaaatgacttcctcctgcctgtccatccttccagcgggtgtcttggcttttggttctggctgtctcactaactagctctgtgaccttgggcagaccactccatctctatgcctctttttgcttgtctattcattgagggggttggatcagaccagctttttgaagatgggtgatttttaaacaagggtgctagcattttttttgtttttcaaaagcctttaaacttggtaagttcttggcagaagataccccagttgaaacatgtgatagaatttttctttccctgcttagtctaagcagtcttgttggatgatgctgaaatgtgaacctctcttgcaggaatggaggggccctttggtggtggtatggaaaacatgggtcgatttggatctgggatgaacatgggcaggataaatggtaagcatcgtgttttcttcctgctttcactcaccctttgccggctgttgcctctcaggtgacttttaggctgcagacccactgaataagtggtttctcacttctgcttttcaaccgaatcaaatgtcttttgaattgccttaaatatttcaaaaactagacataatagtagacttacttcacttggtcgctagtcttttgagatgtcctgtgttcccaagctctgcagtaattttcgagtacagtgttaaaaagcatgtacacgttcgtggttatggtctccgagtatgagggattctttaaagtttgtaatcaagtttgtctctgggagtgctgcaaagggttgttcttggtcatctgccccagctacaagttgtctatagaggcgttaataaaaatcacaggctcttttaatttagcatttacataatgcaaattctggtttagtataattcaaatcctccaccaacttttttttttttttttttgagacagggtctcactctgtcacctaggctggagtgcaatggtgcgatcttggctcactgcaacctccgcctcccaggttcaagtgattctcctgccccagcctcctgagtagctggtattacaggtgtgtgccaccatgcctggataatttttatatgtttagtagagtcggagtttcaccatgttggccaggctggcctcgaactcctgacttcatgtgatccgcccgcctcagcctcccaaagtgctgggattacaggcgtgagccaccgtgctcggcacctgcccccaactttttagcagaaatataataatataataacaatgtagtatttcatttagtccttgtgagaaccacatgatatgtacatactgctatccttgtttcatctgaaactgaggcacagagagtgacatgcctaggtcaagtgactggtaaacagtggtgcctgcatgtgaacccaggctgtctggctccagagcctggcacttcatcatgtgggaatcctgccttttagaagtgcctccagcacagcacttggcccagggcaccagcagggctgtagagtgtgcatgagaaattgtaaattttcctttttgaaatcctttatgtgttggtgactctttgaccttccccttcactgcaggaaagctgctgcttttttacacagaaactttcttggactgagaagtcattagggatttaggtataaaccttcctttgcgggtctgccataacaaaggatgtgaaaatggtacaaggacagacatcattgtcaggcttgaaaggcggctgtccctgatgatcaggcccttcttccggtgcacagggagcagtggggcatgatgtgtgttgccctcttcatgggtgccttgttctagaagctggtaaaaggatgtaggaaagttgtcaccattagtaataaagcaacagaggtctgcgtttccagtgtacattcaagcttgcctgtaacttgtgtgtgcatgggattttaatttttaaaaaaagtttcagaaatctggcttggtaaaatgttactcagagcagattagtctgggtgtgctggctcacgcctgtaatcccaacactttgggaggctggggtaagaggattgcttgagctcaggagttcaagatcagcctaggcaacactgcgaaaccccatctctctcttttttttttttttttttttttttaagaacagattagtcattagggaatttgagttgttgctgtgaggagtagagtgatgcagtttagaagtagatggaaatcaggatgggttggcctgggagctgtgctgagccgtgtgacacagtcgatggtgaactggcaggtgtaatctcgcagtcaggattcagagcctggggtacgcggtggcaaaggattccaagtgctgattctctggagaaccacaaatggagtgtgttttcctagactgttcttagatgttctgagatacggcactcggagtgctccccacaccctctacagctgagaacagggactccttcccacttgaccagcattctttggtttgggtgggatgagctctagagcccttgggcactgcaaggaaactgtacatcacactggaggaagaattgaagcagacgtttgggtttaatgaaatgttaattcatgactagagtgtagccattatggtcatgggtgctcccatcagactgctggtcatgcaggttcccaggacccacactcagcatgagtcaaatcttgatagagtggctataaaaatgtaaatcaaaagattgttaaatgtcggccaggcgcggtggctcacacctgtaatcccagcgcattgagattaatgttaaaaaaaaaaaaagagagattgttaaatgtcaaaaactgactgtagtgaggcagtgtttgacagtgaaaatgctaccctttgtgggtgtaaattggagttcacggtgctccctgagctctggggccctgttgacagccagtaagatgagttatgaggtccttgccaacatgctgatgccagcctgtggcatgcttgtctggagtggggtgctgccttcttgcagacaggtggcaggatggaaggagagcagcagaactccatgaggatgccgctgcggggctgcagggttctgtccctgccgccgtcccccccaccctcccaccaccaccgactcctgggctctgctatccagcagatagcacccatgaggagcatgctgacccatgaggtcacttgggttaattcaaactaggaatgttaagcccaccattggcagccagtccttgttaattcataatgtgctgctgctgccacatctctaatggaattgcttattttattgaaagatagggactctggctgtataatgcaaggtgttcattacatcgcacctatcttacctgacatttctaaggagtgagatgattaataactagattcttcaaggccctctcagcatgggagggagagattcttcaaggacctcgcagcatgaaaagtgtgatccccatttcagcctgcgtgagatggatgcacaaggaaagaagtggccagcagtaggaatcacgaaaggcttatcaagcaagtgaccactgtggtgggcctttcccggcagaagctaggacctttgttttaaaagacattgtaaggctgggtgtagtggctcacacctgttatcccaacactttgggaggctgaggcaggaggatcacttgagctcaggagttcaagaccagccagggcaacatagtgagacctcctctctacaaaaaataaaattagccgggcatgatgccgtacacctgtgctagctgcctgggaaactcaggtgggaggatgacttgagcccaggaggtcgaggctgcagtgaagcatgatcacgccactgcattccagcttgggagcttgggttgacagagtgaaaccctgtctcaaaaaaaaaaaaaaaaaaaaaaaaaaaaaaaaagaaccttacaaaatatgagaaagttgtgacccaaaccccgttatgtagatgcagccactgcagttgtcagcagagaggtctttctgtgcagacatacgtctcgccatgcacacgcatttctgtgttagggcacaggcttctgtattagaggatgggcttctgcactggatttgagtcccagcctttgcctcacctctcaccagcatgtgaccttggtcaagttactaaattgtgtgagcctcaatttctttttaaagtggtagtggtggtggagggtaacaggcgtgcgtggcatggttgtgaagagttgatggaattatacacaaagcctttggggtagggcatgtgttgagtgcctagtaggtgttaccttctgcagcctacgtttgatttagctgcactgcaggggacctcttggttactgtggtagcgaatgcttggtgtacccagtattgtggtttgtgtggctgtaatggaagttgttcattggtccttgatggacttatgttaggtaggttgttcagggattcagttgcagtgactttgttttttagggaatgaagaatgaataatggtttcctgcagaagagttaaacatgctgacttggtggtggctgtcgtgtgtatacattttgttttgtttttgatgtctcagacacagtggtattcctggaaaggcctagggtgatttttccacagagatggagcgtggcatgggtggaggacttgaaagagactttgccaggaaggagatggggatatctcgaagctttggagagcctcttggcagaggaatgagtaagaaggcccagtgggcctcagtggctggggtccgccctctggggtgcaggctgccagggtttacctgatgtccctgctctcttagagtcagctggttttttttaagcttttaaaaaagatgttgttttagacctaggtaaaaaatttaggtcttttagtgttttattgctatatcagtagcattatttgtctttaagtcttttcagatggctttttaaaaaattggcataaggttgtgcaggctgtgggaatggaaactgctgcgtgtacttgactttctggccccctaggcctggagagtgtttcatggccctctggctccctaggcctggagcgtgtttcaaagccctgctaattggggcaggagtttccttaccccagggtgctgtggtgtccagtccagttagcaggatggagtgagttgtgcacttgctgatgcctttgacagaggcatctagaccgactagagaggttttctaaagttggaaggtcttgagtatttaggcctatccgtatgcagagaaattattttttcagttttggttaggtggcagagcaatttcctcctcttttttctttctttcttttttttttttttttttttttttcaagacagagtctcgctttgttgcccaggctggagtgcaatggtgcgatctcagctcactgcggcctccacctcccggtttcaagtggttctcctgcttcagactcttgagtagctggcactgccgccaccacacccagctaattttcttgtatttttaatgagatagggtttcactgtgttggccaggctggtcttgagtcctgacctcaagtgatccacctgcctctgcctcccaaagtgctaggattacaggtgtgagccatcacgccaggtctgttgatgtccattttatgttagctgtattcttcaaatttatgaaggccctagaaaggtggtcattagattcatccttcagctcatcagaggggcaagattcttttttaatacagtctctccctgtcatctgggctggagtacagtgggtatgatctcactgtagcaggctgaagcaatcctcctacctttgcctctgagtggctaggaacacaggcacatgccaccatgcccagctaatttatttttttgtagagacagagtgtatgttgcccaggcttattacaaattcctgggctcaagtgatcctcccgccttggcctcccaaggtgctggggttataggcaacagccactatgcctggccagcggtgtatttaaaaaaaaaaaaaaaaattttttttttttttttttttgcgacagagtctcgctctattgcccaggctggagtgcagtggcacaatcttggctcactgaaagctctgcccctccaggtttaagctgttctctgcctcagcctccagagtagctgggattacaggcgcgtgcccccatgtccggctaattttttgtatttttgtagagatggggtttcaccatcttggccaggctggtcttgaactcgggacctcgtgattcacacgcctcggcctcccaaagtgctgggattacaggcatgagccaccgcacccggccaaagaaatattttaaaacttactggccgggcgcggtggctcatgcctgtattcccagcactttgggaggccgaggctggtgaatcacgaggttaggagttcaagaccagcctggccaatgtggtgaaaccccgtctctactaaaaatacaaaaattagccgggcatggtggcgggtgcctgtaatcccagctacttgggaggcggaggttgcagtgagccgaggtcaaaccactgcactccagcctgggtgacagagtgagactccatctcaaaaaaaaaaaaaaaaattaaaacttactgtcatttgcctgcaaatactaatttgtggatagctatggcaagaatagatggcatgtggctgggcaggtggattacaaggttaggagtttgagaccagcctggccaacatggtgaaaccccgtctctactacaaacacaaaaaatttagccgggcgtggtggtgcatgctgtaatcccagctattcaggtggctgaggcagaattgcttgaacctgggaggtagaggttgcagtgagccgagatgacaccactgcactctagcctgggcgacagagtgagactctgtctcaaaattaaaaaaaaaaaaaaggcatctttacttctgtaggaactttttcttgctaagagccttcagcttcttgccactctgcagcacctctcgcctaattccgctttttggagtggcacatgagtggcacagagaggtggatgtgggcttcttgcctttgaggtcacttcatgtggccacaggaaactgttcctgtcctgaccggcagggcgccacctctcccgctgcggttacaccttctttctgattgggactgtgcgatctctgtcccggaattccctcctgccgctgtgatcagacctacatgagtaaggtgatctcgtcaggttctcagagtggttgggttggtttttcaagattcaattcttgacctctttcccgtgtcctttgccatgagaggtgaaccattgtggtgctcctttccatagtgctttcctactcggtgccccttcctgtgcctaggcagtagatctttgcactcctttgtgcaaacagctgtacttgctgcttcaaaaatttggataggcctgtggtctttggccttcaaggatgaggtgtagctgaggcgatactaagggtggcttgggacatcgccagaggtctgtgcatccaagtggcctagtgaggacgctggtggagacgttggttgccagatgctgctcagggcattggctctgctagggggctcagcaggcttggcacaggcagcaggtgtgcgcagatagagcggctggcggcggtgggtgcaggtctctgtgaggcaggggaggagcatgggcagaacaggctccagttgtggtctgtggggaggcctgtgaatgccgatgggagaattccgccattctctgcaaatcagtggcatgttggttgaaagcttttgcagctgtcttgcaggtgtgttagttggaagcttgatctagttcaggggtgtgcacgggagaatatagtcatgggttctcagttggtttctgtttgggtcagtaaagccccttatccctcttttccacttattactagagacagaaacttaaaaaccatggtttcaggctgccaaaaagcctaaaacagaacaaagcaaagtaagacgtgttggacaagcttggtctaggtgctggaaagccagcctcggctcaggcatgccgggcaggatcgcaggcgtcccgggagaatgagctgtacctgctggtagactgaagtctgtgtctcttggtgaactttcccaccttgtcccacagcagttagttgggatataagaagcagctgtgtggggtgcaggtgcttttgttgttgttgttgtttggtgtctttttttttttttttttttttcttagagacagagtctcactcttgcccaggctggggtgcagtggcacgatctcggctcactgcaacctctgcctccagggttcaagcgattctcccgcctcagcctcctgagtaactgggattacaggcacctgccatcatacccggctaatttttagtagagacggggtttcaccatgttggccaggctgatcctgacctcaggtgatccacccgccttggcctcccaaagtgctgggattacaggcatgagctactgcgcggccgggggacaggttttaatggctttgtggccgtggtcataaagcgaaatgtgcctcgtggctaatgtccaagttgctgagcatatactttgagaccagagcgggtgggtacaagtgtcttctacatagcaaaagatggaccagaagcttggaaaggtaatgctatgatagcatcagacaaaccttaaagaggtgtgggtgcaccgtgggcaagtgagcagcagcactgtgtttgggatacttggtggggggtgcaatttaggtattttcctgaaaccttatctgttgcctagtcacagcacacccagctcatttcaggcaaggctggcatgctcaaggatttccgcgcagagctcatttgttagcgttgaggttgtccgtggagctgcagctttaatttgctctatgataatgagaggtgcctctgggtggataaatgtgggctccaagtgggtgatgctgggcggtcttctgaacaagaagttggctggggtgggggtgggggcttactttccagctcaggggaggcaaggaagcctcagtcctgagagcctggaccagctttagaaaactgccgctgagcgagacccgatggccctcttcttgctctggctctcagttcatgaatgcatatgactcctatctctgctgggcgcattcgcaggtgaccccgcacgctgggcctcagactctggagctacgtggggtcttggcatcgtgacccagcatcaaggactctcctagttctctgtaaaatgatcttgtctgtgcgtgtgtttctcaaacccctttccctttatcttgtcatttttattagtagtatttctactctggaatctgtaatgagcacatttctattgccatagaggaatttggctaatttttttttcttcctgatttccttagaaatcctaagtaatgcactgaagagaggagagatcattgcaaagcagggaggaggtaggaaccgcttagtttgatgttttgtttttttagaacaggctgttatcgctggggactgtagagcttagtggtgagaagtgcgggttctgacacagactgcccggggtgggagcagctctgcctttttctagctgtgtgacgtttggcaagtcactgaacctctctgtttctcatagcactcatttgtaaaatgggggtgtaatagtacctgcctcagggatgctgtggagagtgaatgcatgtgaaagagtgcttccgcacgtgctgtgcacaggccgaccatcttcattgttagagtacctctcttttgggggttttgttttccacattataaattcctaaaagtaaatatattttccttagacttgatgataagactgaaagcacaccacccaacaagtaataaatgcttgtaaaatagataaatgtactcattaggaaaatatgaagaaagtatggtctgaaaccccatcgcccagtgatgactgccggaaacattttgttctgaatctttcattcatacacagctttatggatactgagaacaaaatgtactttttgagcatttttggagacagtctcgctctgtctcccaggctggagtgccgtggtgcagtctctgctcactgcggcctcaacttcccaggcctaagcgattctcccactttagcctcccaagtagctgggactacaggcgtgtgccacctggtttggctaattttttgattttttttgtagagatggcattttgacatgttacccaggcttatctcaaactcctggcctcaagtgacctgcatacctccagagtgctgggatgacagatgtgagccaccacacctggcccaaatgtactttttcagcctgattttccctctgagtatcttggcatctcacctcctgacttctgtgttgggctggctctggagctccacgctggtaccatttcctcccatttctttttttttttttttttttgagagacggagtctcactctgtcgcccaggctagagtgcagtggcacgatctcggctcactgtgacctccgtctcctgggttcaagcgattctcctgcctcagcctcccaagtagctgggactacgggcgcacgccaccatacccagctaatttttgcaattttagtagagatggggtttcaccatgttggccaggctggtcgcgaactcctgaccttgttccgcccgccttggcctcccaaagtactgggattacaggcatgagccaccacacccagctgccccacctcatttctgatgcctttgggcaaagtgcccattctcgctaggttccttatactgtggggaagttctgagacgtctcccctctgaaagtcacacattcttagagtcgggcctgctttggccgctcactgtgtgctgtgcagctagagaagcaggcgcggtgtggccagttacagagccagttagagaaactgcccagtttcctcttgaattggtatctttgactaggctgcttgggtcggtcacaggctggctctgggctgatggccactctcagaggcaagcgacagggtttcggggaggagccccaaactcggcatgtggaaaggggtggccttgctgacggagccagaccctgctttccagagttgcaagcaccacgggtgggggcgtcccttcgttctgctgactgacccccagccgctaccagagcccactctgcagtgccatcaacatcttctttccaaagccagcaagtcatttggtttccctgacaatagggtccccaaaagtggccagctgtgtgcatttgtacacagaggatctctcggtgtgtgtttttttgacctctgcttgatggtgtggccgaaaatcctttctctgtgccctgggagcgctgaggaaatgcagccagagtggcccccagcagagcatcctagagggacaggctgggaggggaaggtgggagtgactccgacttgtctccacataactcctgttcattaccctgggtggccccccgagtggggggtgtccatgcctccccctggagcatttctcagtgtctgctgatggagaaacctcagatgtctcaggaattgacgtccatggttcacaaagcttgtcacagacactagcacctcacagacacacatacaggggtgttctttagaagttgtgttatggaaatctcagctgtggcatagagcagagagaatgctgggaggcccccatgtgcccaccacacagctgtagctgttgtcaacatttgaggggtgtcttaatggtaaattatggtgggcctttacccctgatccatgcccatgagctgaagtggtctggcgtgttgtgcacacgcacactcaagttcttgacacccacctgtgttttgtgtccctgtttcaggtggaggtggaggaagcgtccctgggatcgagaggatgggtcctggcattgaccgcctcgggggtgccggcatggagcgcatgggcgcgggcctgggccacggcatggatcgcgtgggctccgagatcgagcgcatgggcctggtcatggaccgcatgggctccgtggagcgcatgggctccggcattgagcgcatgggcccgctgggcctcgaccacatggcctccagcattgagcgcatgggccagaccatggagcgcattggctctggcgtggagcgcatgggtgccggcatgggcttcggccttgagcgcatggccgctcccatcgaccgtgtgggccagaccattgagcgcatgggctctggcgtggagcgcatgggccctgccatcgagcgcatgggcctgagcatggagcgcatggtgcccgcaggtatgggagctggcctggagcgcatgggccccgtgatggatcgcatggccaccggcctggagcgcatgggcgccaacaatctggagcggatgggcctggagcgcatgggcgccaacagcctcgagcgcatgggcctggagcgcatgggtgccaacagcctcgagcgcatgggccctgccatgggcccggccctgggcgctggcattgagcgcatgggcctggccatgggtggcggtggcggtgccagctttgaccgtgccatcgagatggagcgtggcaacttcggaggaagcttcgcaggttcctttggtggagctggaggccatgctcctggggtggccaggaaggcctgccagatatttgtgagaaatgtaagtggctcttggggaacttcttggtggtggtgagcatgaggggacaggggaggcaaagatcagcaggatgaagtcagaggtggcgcccttcaaaggggaccacacctccttgccactgtcccaaacgttttatgctagtgggacaagtaaggaatgtgagaactgtgggttctggaagagcctgggcttctccactgtgctagaatatggagcagacgctgagctcagagactccagtttctgattggttggcttgaagaggcactatgtgttgcacgatggtccagggaaagaagtggctgtaacggaattattttccccagctcagccacccttagccactatttagtgactgtgggctgcgcaccgcaggcctgagtgtcccatcctgcacggtgctcccacaggcagagccccagggagggagctggctgtgccgcttcacagccttgtcccacatgtatctattagtttcctgctgatcgcctcagtctgaagggcagccagcttctcggtatagtgagaaatctagcatggccctcagagccagctgcaaggcatgccttaggatttggtttaatcacgcatcagtctcccttttcttctccccttcagctgccattcgatttcacatggaagatgctaaaggacaaattcaacgagtgcggtaagtgttgggaacggctttgtaggtgcttccctcgtgcttgttggtgacgcagccgagtcagcagcaaaacctccctcccagccccctccgtcggctcaggacccatggccttgccatgttctgcccacgccaatgctcaggcaggttgttgagtgtcctgtgatgtgtcacatgtttttcagctgtgttctcatttcatccttacttccttttttctttttgagtctttgaaacaaggtagtagtgtccccatttcacagatgagtcaggcagagtcttccttctgaggttacctggcttctaggtggcaaggctaaataaatacatcccagacgaggtcgctttcccctcagcacagctggtgtggggcctcggagagaacacagcccagcaggtgccatggggaggcggtgcaggctctgggcacacagcagctcctgtgagggtgaggctaaggtcttgtggtttcctggcacatcgggcaactcttctggagggctctgtctgtggctgaaagcaagttgtcttccttccctgccctccagggtgagcccccaccccgcatgcaccacctctgttctttttagctagaggggcctgagctagaggtctgggcagctgcttccgcactgtcctcccgcttcctgtttcagcagtggctccgatttcaccaccattgctgcttctccatggttcttggggcaagccgttgagtcatgatctgcctctttgctccattcttcacctctttccccactcctgagttcccatgttgtagctagatattctgaaaaggccagtgggatcacagcgcccccagcccccacttttgcaatgcctggagcggccctgtgccttcaagaggaagtccagactcacaagccccttgaagacctggtcctatcctcctccatctccctcctgtcccagaacctgagcggcaagtgctgcacgtgtcccgcaatgctctcgtgtgagccaattactggcaagtcttctttctggtgaatttctgtgtaagctcactcagaacttgcccctgaggacccctccaccctacctgccctgggccctctcttaggcactgagttcccacctctggcattgtggccctaccacctttggtactcctggagtagagcctttgccctctagggctctgtccacggcgttgacacatatctggatgcttaacgggtgctcaaatgaataagtgaaacctgctggctttcatttggacagtacagacgtgtccattggattgcggatggctttgtaaccaggggcggtggcatatcaaaaatgaagactttgtaaaatgtatgggaactttctgcctataaagctggctttacactgcgccttcttttttgaacttcctgaagcgtaaaggcgtgcattgaatccgccaggaaggcttttcatggggcaggggcaggctctgttagcagaagaatggcagtgtggctgagggggccgtagtcattggttctcgccattgtattctgagcctttgtgctctaggcttcagggcctctcctttttgactctgtccaccaaaatctaacaaaatcgggactgagtgtcgtctcttcttccctccctgtcctaggccacgtgctgtacgccgacatcaagatggagaatgggaagtccaaggggtgtggcgtggttaagttcgagtcgccagaggtggccgagagagcctgccggatgatgaatggcatgaagctgagtggccgagagattgacgttcgaattgatagaaacgcttaagcagttgccttttttaaacatcgatacgagacctctgaatttgtattttttcttgttaaccattttaatttgttggctggatgtataaagatgtttaaaaaattcagttgctttttggggtaatttgaattacttttttaatgactggggttccatttgactgtttgcattgagattgcaatgtgcgcaattttttttgtagttgtggcatcttgttgacatcgaatatgactttgataataaataccggttcctgaaaacggcctgcttgtgtgtgctgtgtgggcaaccacgcgaggtgtggggagctggggtcactcgagcttccagtccaagcagcagggatctcatcccctctcttgcttgtctgaggccccaggggtgggtgcctgcccacagatggggggagactcttccctggaaactgccttcctgtgggctgtaatcccccggcttacaatggagcgtttggctgtttagagccttctgaggccaggcgcggtggttcatggctgtagtcccagctactcaggaggctgaggcaggagaatcactcgaacccaggaggcggaggttgcagtgagtgagatcgcgccactgcactccagcctgggcaacagagcaagactccgtctcaaaaaaaaaaaaaaaaaagccccccgaaagccatcctgtctccctgttgtgaagttaacgccctggggcacaggccctgcctgagtcaggcttgttctctggctttttttttttcctgctgaaacagaccaaactgtgtgccaccttccatgcgtgttcagtcctgccagaggctcaggccaaatctgattgatacctgggctctgtcagaattgggtataggccccaccccttcccccagtgaagcgctctcaggatccactcaggccaagcaggtgtgcatacctggcaaggaggcctggctgctgctgttctgttggctgtggaggggcgcgtcctgcccggctgcctgcctggtagcacatgctgttctgatcacccggagccccccttgctcaccagcttcttgccacccttttctccccactggcttttatccctgaggggtgagaccatggcagggtgaccccagacacacccccttttgtgtttggtcagggggttcccgtgcctttgctccactgtgtgccaatcaggagggaaagaaaagacaagaagcagggactgctttaaactggggctttatgtggccaggtacaagcccaggcagctctgtgactttcccgcgccgggatccagggctcctgggtgagcgggcgctgggctggctggctgtcctggccccacgcctaccggtcttaccgtcccagggggagtggttggttttccaggggatctgccgaggaagcgtgacttccatggacccctctccccagaagcccaatagtgagcagcgcccccggggaatcgccagggtccctccagccctcccagagtgtccacgtaccgcagaagtcgacatcatcgtacacctccgtctccctggcagagcacagttgggtcagcaaggggcaccgtggcccattccccccaccctgcaccacacaccccgcactcccccaccacggtcagggctggcactcacaggggcaggagcgctgttctgggcacgtagccatctgtggagagagtgggcatggtgggttctgaggcccagggtggcggcggggacctcccggggctgcggggccgggcgcactcacatttgcctttggggtcccggcacagcatctcctcattgctggtgaactcgatcacctccaggatctccccgcgccggatcccgaggtgcttgccacccccgcgacgtgtcttagcgttggggtcgatcatcatcttcgtgtgaaccacgatctccccttcaaactggggcgcgagatgttagggcctctgcttgtgctgccgcccttgggcccctgtcttctttctgagcctgggatcggtgggaccctggtctccgccctgccaggactcctgcttagctcagaggcctcaccttgaacttcttccggaactccctctcggccttctctgccttcctcagctgcttcagcaactttgggtccatgggtggcaactgctgtggctggggatccttctccttcctgatagcccccaccaaggaattgtgtgctcgtgagcaagttgtgctcctctgggggttcctggagctcgccccccgtctgcccaccccctctgcccatggcacctgagcgctgggtcttgtggtggcctcctggcggcttgctgaactgagggcgcttcatctggggacagtcaggactccgagtcaaggcagggcccgccggctcagcctttaccctggtagctgttttttgtttgtttttgtgtttttgttttgagacgaagtcttgctctgtcacccaggctggagtgcaatggcacaatctcggctcactgcaaccttcgcctcctgggttcaagcgattctcctacctcaggctcccgagtagctgggattacaggtgtccatcaccacacctggctgatttttgtatttttaacacagacaggtttcaccatgtgggccaggctggtcttgaactcctgacctcaggcaatccactcgcctcggcctcctaaagtgctgggattacaggcgtgagccactgcgcctggcaggtggctggatcttgagtaaggcctccctgtgtcagttctgaggactccccaaatcccaccaggtcccctcccaaacctctccctgcccaccttcttccgcaagcctttctcaggggtcatgggttcttctggattgccttccattcccttaactcctgccacgtgctcagcatggtgggaactgctgggccacgcccctcatggcagccctctcagcaaccttgttcatgccagtagacgccactgtcatgcccaacttgtccacaaggaaataaaggctcagagaggtcaagcaaactgcccaaggtcacccagctggtaaatggtaaaggcaggatttatctgtaggcttcgaggccatttcacttctgcctcctagagcaagttgggtctagggttcttttttattttttgagacggagttttgctcttgttgcccaggctagagtgtgcaatggcgcgatctcagctcactgcaacctccacctcctgggttcaagcgattctcctccctcaacctcccaagtaggtgggattacaggcacatgccaccacacccggctaatttttttttttatttttagtagagacgggtttcaccatgttggccaggctggtctcaaactcctgacctcaggtgatccacccgcctcggcctcccaaagtgctgggattataggcgtgagccaccgtgcctagccgtttttttttttgtttcttttgtttttgtttttgtttttgagacggagtttcattcttgttgcccaggctggagtgcaatggcatgatctcagctcactgcaacctctgcctcctgggttcaagcgattctcctgcctcagcatcctgagtagctgggattataagcacccactgccacacccagctgatttttgtatttttagtacagatgaggtttcgtcatgttggccaggctggtctctaactcctgacctcaggtgatgcccctgcctcagcctcccaaagtgctgggattacaggcctgagccactgcacccggtaggttctggggttctactgtaatgagatttgggtgaaaaactaaggcagaagggaggatgaggagaggctggcccatgggtacaaagttacagttaggaagaagaaattgggtgttccattgcacaggagggcaatgatagttgacagtaaaatatcatggccaggcatggtggctcatgcctgtcatcccagcactttgggaggccaagtcgggcagatcacttgaggtcaggagtttgacagcagcctggccaacatggtgaaaccctgtctctactaaaaatacaaaaattagacgggtgtggtggtgggcgcccataatgccagctactcaggaggctgaggcaggagaatcgccggaacctgggagctggaggttgcagtgagtcaagatggcgccgctgcactccagcctgggcgacagaccaggaccctgtctcaaaatagtaaataaaaataatttttaaaagatgctgctagggtaagcgtcctggactggtgactgatgatgagactctggactgaggggtctcccatggtgccagtctccctgtgccacttcctggcaaatgaccaggctcccaagtcagagccctgctggccaaggaattggcttcaggtgggagccccaggaaccctggtgagtgaaagatccagaacccagagccccagcatgtcctttccgaatggctcaaagtatcccgccggacatttcaggcctgtagtccctccaagcagcccaaggagcagcacctgaatcgtgcccgccagataccaggcatggccatccacagtctcacctggaacacacagcccctccagctgctcctgcctctcagaggcttccctggccgtgagcagtcactccaccaggagcgaacctgaccttggcactccagggtccctgcaaacccgccacattagagcacctcttggcaccgccatgcaggcagccctggttcatccacagctgacccagagcaggcctctgcccgccttccccgcatggccagctcagatccctgggaaaggctgggctctccccacctgcagaggagccccctgccttccaggaacctctgcagtggagctgccactgctccaagtaaggcagacagtgggaaaggggagtccagagtcctggccccaagagacctaagctgcctttgagaagctgcacccacagtgagaagcccacgccactcctgagaagcgggagatccagggaagtgggacctttttttttttctttttttcttgagacagggtctcgttctgttgcccaggctggagtgcagaggtgcaatctcggctcattgcagcctccatctcctggattcaagcgatcctcccacctcagcctccccagaagctgggactacaggtgtgcaacaccatgtccaactaatttttgtatttttagtagagacggggtttcaccatgttggccaggctggtctcgaactcccaacctcaactgatccgcctgcctccacctcccaaagaactgggattttaggcatgagccaccgcgcccggccccttttttcttttttcctatcagaacctcaaatgactggcaaggaagggggagaaggttatttggtgacaggaacaatgggccaagggtggggactgtatgaagtttgaggagaggcagatgctcctagcctcggaagaggtgggggattccagcagggcttctgggagtggttggaggcaggctgtcactagcccaggcgctcagcagccccactcctggccatccgcatccccaacggtggcccccagacccaagccacagagcctcccctagagcggaagcagaaggggccccaccaggaagctgtgtgctcacagggaggtgttgcaagaagctcagggagaaagcccaggagaagcagagggggcctctctgccccaggccctctgaggctgtcagcgagagcaggagcaccttagaagctcaagctctggcccccgctgaaagccctgccacagatccagctcgtggaccagctgtgcaagccagggcaagccccatcccagagcctcaaccttgcgtacctatttttttttctttttttttttttgagatggagtctcactctgtcacccaggctggagtgcaatggcaggatctcagcttactgcaacccctgcctcccaggttcaagcgattctcctgcctcagcctcccaagtagctgggattacaggcgcctgctaccacacccagctaattttttgtatttttagtagagacaggttttcactatgttggccaggctggtcttgaactcttgacatcaggcaatccacccgccttggcctcccaaagtgctgggattacaggcgtgagccactgcgcctggccttttttttttttttcaactgagacagacacagagtctcactctgtcacccaggctggagtgcagcggcgcgatgtcagctcactgcaacctccacctcccgggttcaaggaattctcccacctcagccttccgaatagctgggatgacaggtgcatgccaccatgcccgactcatttttttttttgagattgagtctcactctgtcgcccaagctggagtccaatggcgtgatcttggctcactgcaacccttccttcccaggttcacgcgattctcctgcctcagcttctctagtagctgggactacaggcacgcaccaccacacctggcgaatttttgtatttttagtagagatggggtttctccatgttgttcaggctggtctcgaactcctgacctcaggtgatccacccgcctcggcctcccaaagtgctgggattacaggcgtgagccaccacgcccggccccagctagtttttttatttttagtagagatgggtttttgccatgcgggccaggctggtctggaactcctgacctcaagtgatccgcccaccggacctcccaaactgctgggatgacaggtgtgagctgccacgccgggccagccttgtgcatctgtaaaatgggggtgcattgccttactgccctgtggggatttgggagtggagggtacggatttagggacaggcaggcaaggtgcttgcctggaagctgcttgtgttttcatgaaggcattaactttggagtggagggtacggatttaaggacggatttaaggacagatttagggacatgcagggagtggagcgtacagatttagggacaggcaggcaaggtgcttccctggaagctgcttgtgttttcatgaaggcattaactttggagtggagggtacggatttaaggacagatttagggacatgcagggagtggagggtacagatttagggacaggcaggcaaggtgcttgcctggaagctgcttgtgttttcatgaaggcattaactgtggagctgggcaggaggtgcgggcctgctccctattcacccagcacaaacttctaagaaacctttggcagcctccctcccctgccactgccacacctgcctgcaggccacacctccccctgagtttcaggcccaagttctgcctggacatcccctcagctaccttgaacacaacaggtctaagtaaatcaggctgggcgtggtggctcacgcctgaaatctcagcactttggtaggctgaggtgggcggatcacgaggtcaggagttcaaggccagcctggccaatgtagtgaaaccccagctctactaaaaatacaaaaattaactaggcatggtggtgggcgcctgtaatcccagctacttgggaggctgaggcaggagaatcgcttgaatccaagaggcagaggttgcagtgagctgagatggcaccactacactccagcctgggcgataacagagcgagactgtgtctccaaaaaaataaaaaataaaaatataaggccgggcgcggtggctcatgactgtaatcccagcacttgtggaggctaaggtgggtggatcgtttgaggtcaggagcttgagaccagcctagccaacatggtgaaaccccatatctactaaaaatacaaaaagtagctgggcttggtggcacgtgcctgtaatcccagctactccagagggtgggacaggagaatcgcttgaacacggaaggcagaggttgcagttagccaagatcacggcactgcactccagtctgggcaacagagcgagcctccatctcaaacaaaaaaacgaatacataaataaataagggtcaggcgtggtggctcacgcctgtaatcccagcactttgggaggccaaggcaggtggatcacgaggtcaggagatcgagaccacggtgaaaccccatctctactaaaaatacaaaaaaattagctgggcgcggtggtgggtgcctgtagtcccagctactggggaggctgaggcaggagaatggcatgaacccgggaggcggagcttgcagtgagctgagattgctccactgcactacagcctgggtgacagagcgagactccatctcaaaaaataaataaataaatgaatggatggatggatggatggatgaatgaatggaacctaacatcttgtcgtcaacccaggggcggctctgtcatgcccttgggtgctaggcttgaaacttccctgctttatataccaccaaatcctgctttttttttttttttttttgagacagggtgtttgctgcccaggctggagtacagtggtggagtcacagcctcactgcagtctgcagtctcgacctcctggactcaagcaatcctcttgtctcagcatcccaaatagctgggactacagatgcttgtcacacctggctgatttttaagtttttttgtagagatgaggtctcgctctgtggcccagactggtctggaatcttgggcttacgggatcctcctgtcttggcctcacaaagccctgggattggctcaaacgatcctcctgcctcgggctcccaaagctctgggattacaggcatgagccactgcacccggcctgatgcctgcttttgattactgaattcacccactgctcccacatctcctgctgccaacctgggccacacctctgcctacaacagccttctcactggtccttcgcctctgggctccccttatgtagttccacccagcaggagccagcaggtcctaaaatgttacttgctcttacaccaggagcatggcagaaaatggccttgccccgaatgttttgcagggactcgggcaggccaccaacaaacctctgcccttggggctggggctggagtcatctctgggttccacatcgtcatacagctcgtagatctcatctgggaccctgcggggatacctgagatgaggcctcttctttttttttttttttttttttttttgagacggagtttttctctgttgcccaggctggagtggtgcaggggcatgatctcgggctcactgcagcctccacctcccgggttcaagcgattctcctgcctcagcctcccaagtagctgggattacaggtgccccccaccacaccgggctaatttttgtatttttagtagacggggtttcaccacgttggccaggctgttgtcgaactcctgacttcaggagatccgcccacttcagcctcccgaagttctgggagctccaggccgagatgaggcctctttgagccccacaatccgcacccacctccgcttcctccccacactcactgcgggatgtcttcaggctgtcggtcctggaagtggagcccagcggccgagcgggtcctccgtagatctgtggggtagagagtagggcagggaagccggcactgcctgggacctcagcccccgctcctgccggtgccgcccgccctcacccacctatggatgctgcagagggtctccgaaagctctgcatatccacgggccccgggggcagcgggggcttggctggagggtgtcccaggctgctggcagggggcagaggcctccgccggggtggatggctgggtctgaggcctggcctggcccctccactgtgaaccaggcctcctgacctccagcggggtgtcccagccgctccaaacccagggctgagcgggtgccgggagctgaagccggccacggccgcaggcagtgagctctcggaagcggagctggggagtggaggctttcgagggagatcaccgaagaactcaggctgcgggtgtctcttgaggacagcgctgggctcaggctgtgagaacttgcggggtggcccccggcgctccggctgcagcagcttcctggggagtgagttgaactcgggctctgaggaggtcctggggaggccgcccagctcgggctgcgggggcttcttggagagcgctttgaattcggccggccgcggcctcttgggaagcacgctgacttcgggctctgaggaggtcctggtgaggtccccaagctcaggctgcggaggcttcttgggaaagtcactcagcggaggctgggaggcctttttgggaaaggcgctggagtcgcgcttcggctcgctggactgaggcttccagaggggagtctgagcggcctcgctgaactcaggctgcggcacggacttcttagggaggccaccgacctgaggctgcggaggctttttggggtacacgttgaactcaggctgcgcaggcttcttgggaaaggtactcaactcaggctgcggggacctcggggtagcctcaccggcctcgggttgccagagcttcctggggaatgcgccggatttgggttcggaggggggtctggcggggtgactgagttcgtcgggctgcaggggtttccgggccggcgcaccaggctccggcagcgaggccttcaaaggggcctcaccgacctcaggctgcaggggcttccttggaaacggagtggcccccagctgtgggaacttcttggagaggtcactcaactccagtttggacggcttcttggggaggtcagtgacctcaggcggcgggggcttcttggggaggtcagtgacctcaggcggcgggggcttcttggggaggtcagtgacctcaggcggcgggggcttcttggggaggtcagtgacctcaggcggcgggggcttcaaggacactgcaccaaactcaggcagcggggccttcttggggtgctcgcttagctcaggctgggagaacttcttcagtttaccaaactcaggcttcggaggttttttgggcaggtcgctgggctccggctgagaggcctggaactttgctttgatgctccggaagtcctgatggctctcctaggagacgcagagccaatgaggcaggggctcaaacacacagaaggggcatggaaggatgggcctggggaccctcaggcacagcccacaaccaccacccctgcgcccaggcccggtcagccctcagctctttcccaggagcccccatggatcctaggatcctgggaccgacacccctccctacttctccatttagtgctgattccacacccaacctcctctagcagcactggagatcccgacatccctcctgcagcctccagtcccactgccctccccccatgggtggtaccccacccccccagcatccttgaccccctcattctttcacccctcccactgcatgtctccagtctcgttccattgcccaggctggagagcagtggtgcaatcatagctcactgcagcttgcaactcctgggctccaatgattcccccgacctcggcctccccagtagctgggattacaggcttgagccgccgcgcccaggcccccagtcccttctgtgctaatttcaaaacacatccggaatccaaccacttctcactgccttcaccactgtcaccccaggaggtagtgggaggcagtgtctgccctcccccaaccaattgcctggattactctaacaagcccttccctgggcctctgcctacccccttccctggtcagttccccccatggcagctggagggagaagcctgttgaaccctgagtctgtttgtgtccctctgctcaaaactcggcaatgcttcctcatgtccccacagttcaagctaaatgcctcataaaagcctgggcgaaccagcctccctacccagccaccttctcctccctgcaccctgaacacttccctccgacctcggggcctctgccctgtccctgacccaggacatgtctctgcaccacctgggtctctccttttcctcctcccagcctctgttctcatattttcttattagagaggccatccaaggccaccctatttgtttatttttattttttgagatggagtcttgctctgtcacccagactggagtgcaatggcgcgatctcggctcactgcaatctccacttcccaggttcaaatgattctcgtgcctcagccgcccaagtagctgggattacaggcactcgccaccacacctggctaatttttgtattttaactagagacagggtttcaccacgttggccaggctggtctcaaactcacgacctcaggtgatccaccctccacccgcctcagcctcccaaagtgctgggattacaggtgtgagccaccgtgcccaacctagaccaccctatttttctttctttcttttttttttttttttttgagacggagtctcactctgtcacccaggttggaatgcagtggtggaatctcgccatactgcaacctccgcctcctgggttcaagcgattctcagcctcctgagtagctgggatcacaggtgtctgccacgacgcctggctaattttttttgtatttttaatggaaacagggttttaccatgttggccaggctggtctcgaactcctgacctcaagtgatccacccacctcggcctcccaaagtgcatgagccatcacgcctggcctagaccaccctattttaaatggatcaccccatcccactactgccctgcattcagcatgcatgattttctccatcgtacccacccctacgtattatactattttacattgtttttaatgtgtcttgatttttttttttttttttttttgtctctctacaccacaacttccctcagttcctcagcctctgcaaggcagagacttggctcattcattgctgtcttcccagggcctggaacatggtaggtgctcagtaaatatttgctgaaataaacaatattcaggcagcacaaagacagccatgtactcagcctgaccatcaggaaaacacagagatgcctggagacggccatgcggtccctctcacaccgtctctgacatgcgggctgatggtcaggaatgctcacagttgacagtgcctgagaggattggtgcagacaccgtgggcacaggcgctgtctcctgcatacccagctgtcccagctgccctcctagctggccctgcaaccactcctcacagaggtaggcagattcacaagaaggccaggcctccttagtcctacaaacgcccctttcacctgtggtcaaggagattgggggagggaaagggcagaaacgtgtggcctttgcttcctgcgtgtgcctcactttccccatccagaggaccagagaccaggattgctccttggaaaggcagcaattcccacctggggcctgaagtgcccctgtcaaagccccgagtggtttgaaggaagtgctcccgggcgaccacagggctagataagtcagggttagcaggtcacaacttgggtgactggacgggggagggtcatgacccactttgtcaccccgcaggaaagcactgctctcaccccagcagcccgttcccacatggctgctcatgttgacctggggagacgggagttgtccccccggggagtcccatctgtccccctcgcagtcccaacctgagcgtgaacccccaggagcccgcgctgtcctggggtgtgcctggtggccgcctacctcgggtcctttttgccgacccttcccgtttcccagatgtctttcgcagccaccccccgcccccccgcccgcccctccacaggtggatcctatccttctgggaacatctgtgtcccttgcttcccagccagtgaggcacaggcctcttccagcactcaccatggctgcaggcaggtgatgggccatgggatgagtgggacccgagctggggccgctgccttcaggaagtgactgtggcttctgctccacggtcagcacacagggtgggggctgctagaggtggggcgggggagggcagaggaggaagggaaggaggtggggaggctccagtccgtctccagatcctgccagccacttctttttttttgagactgagtcttgctctgtcgcccaggctggagtgccatggtgccatctcggctcactgcaacctctgcctcccgggttcaggcaattcttttgcatcaacctcctgagtagctgggattacaggcgcgcaccaccgctcctggctacttttcgtatctttagtagagaaggggtttcaccatgttgggcaggctggtctcaaactcctgacctcaagggatcggtccgcctcggcctaccaaagtgctgggattacaggtgtgagccactgccccggcccctgctgggcacttctatttcgcttgaattcctgtcctgcctgctactgtcccaagcttggggcactggttgcccgcatgttcctaacatggtcactagtttctttcttttttttttttttttttttttttttgagacggggtatcactttgttgcccaggctggagtgtagtggcgcaatctcgactcactgcaacctccgcctcccaggttcaagcgattgtcctgcctcagtctcctgagtagctggaattacatgcatgtgccaccactgccggctaattttttgtatttttagtagagacggggtttcaccatgttggtcaggctggtctcaaactcccaacctcagatgatctgcccgcctcggcctcccaaagtgctgggactacaggcgtgagcaaccacgcctggccaactagtttcttactctctatagtccccatcattcctactactttggtgtccccatctctggactccagggaggactccatgccaggccctggtgacctcctgggctagagagccacaggatggggagatctcagcagatcaggggtacggacagctctggggtttaggaggctcctggggaggcccagaggcccaggacgtgggggcccatgtgaccgggtgaggcctctgctgtctgccctggttggctcatccgccttcctcatttcaacacttccatgaaatccaattcccggctctgagcaggactcacttgttctggggcagatatcacaggccatggatgtcccaggctgccgccctgggcagaaagcttagctggtacagcagatttgggggtcggtgggtgagtggtgtcaaaggccttgcacctgggccacgcacggtggctcacgcctgtaatcctaacactttgggaggctgaggcaggaggatcacttgagcccaggagttcaagaccagcttgggcaatgtagcaagactccatctctacaaaaaatataaaattagccaggtgtgatggtgcacgcctgtggtcccagctgcttgggaggctggggtgggagaatcacttgaaccctgaaggcggaggttgcagagtcaagatcacgccactgtactccatgctgggtgacagagagagactccatctcaaaaaaaaaaaaaaaaaaaggctttgcagttctggaggagtgagggggtctgaggacccgaggacacaccagattcccagaggttagaggtagtagagagaagaggaaccaggagacagagacaggggccaagagggggtgaaggcagtcacttgtggtgccgaggactggccagataaggacaagccctgaccacagagctcagcccacaggagatcagtaatctccgtcacggtagacaaagggagaaaacacctgctaagagagtagagagccctggttttcagtttgagcacatgttggaattgcctgaacagttaaaaaaaaaaaaaaaagaaccggcggttgggcagtgtggctcacgcctgtaatcccagcactttgggaggctgagtcgggtggatcacctgaggttgatcacctgaggttgggagttcaagaccagcctgggcaacatggagaaaccccatctctactaaaaatacaaaaattagctcggcgtggtggcgcatgcctgtaatcttggctacttgggaggctgaggcaggagaattgcttgaacccaggaggcggaggttgcagtgagacgagatggctccactgcactccagtctgggtgacagagcaaaactccatctaaaaaaaaacaaaacaaaaaacagaacctacaagaaactctgacttaatcagtctggggtgtggcccgagcaagtatttttaaaacattttaaaattttttttttgagacaaagtcttgctctgtctcccaggctgcctcccggcttcaagtagctgggattacaggtgcctgccaacatgcccggctaattttctggatttttagcagagctggggtgtcaccattggccaggctggtctcaaactcctgacctcaagcaatctacccacgtgggcctcccaaagtgctgggattacaggccttagtcactgcgcctggcctgcctgttttcacgcctcctttaagagcacagacatcaggattctgccatctctgttgtgcctttgcatcctgtcctggggcacagttcccagatgtgggttgccctcccaaaaaggagtctcgggaggacagtatgggctctctgtgggtctccagaaccttggcaagtgaaggaaagaatgaaagaaagaacaagtggccaggcgcggtggctgacgcctgtaatcccagaagtttgggaggccaggcgggcgtatcacctgaggtcaggagttcgagagcagcctggccaacatgatgaaaccctgtctctactaaaaatactgtttgtgcacacctgtaatcccaggtacctgggaggctgaggcgggagaatcgcttgaacccgggaggcggaggttgcagtgagctgagattgcgccattgcactccaacctgggtgacaaggcgagacaccgtctcaaaaaaaaaaaaattaaattaaataataaaaataagtaaataaataaatcaagcaatgcttggccacagtaaggagctcaatcaaggtaattaaaggattggatgacagctgatggattcccaggtgcctgggctggtcactacccgtgcactctcgcagctaggagggtccagccagggcgcgcgcaccaaggccccacgggggcgccgtgggggtgaagcgcaggtcccggagctgtagtcatggtgcgcctccccgccaactaccctttgtgtatttggcgcctccgtaggggctcccggcagggttccgcgcggcgcggctgcagacagggacagatagggttaccggaatcccggagaagggagcccggaccaggggagtgagagttcgttagggcgcgccttggggaatctgcggggtcggaaacgcgaacaacggtgtgcagggggaggagcccggggagcacgtgggcggcggatcccagggccgcagggcgccctccacctccccgctcctggcccgcaatgagggtaaccggaccggcacctgcaagtgacagctggggctggacaaatgccgggcacgggcctctggccggcctcagagctgttcagcgcgagcccgcggcttccagccaacctgcccgctatccccactgctctcccggctttcattcccccgagtctgagattcctgggcgccccctgctgggcggagccggggcccaagagggctgggctcctgtgcatgggggttgggggccggcttgagggtaggaggtcgtttctgcagtggacagggtgaacggtggaggacaggtggtgagccagctccccaggcctcgcggcagtcagttcactccagagggtagtgtggtggccgtgggcccgctgtacacacaggaagggctgtcccatctccgtgggtgatggggtaggggagaggtccctggacggacgtgttggctctaggtttctctggaaagatactgacagactgggaagaggcgtggcctagatctgggggtggccgaataaagaaactgatggggacaaagactcctgggggcccccgggaccctggagaggggttaggggcctgggggacagagaacacagcgctgtccctggagatgggggagaggcttggactacagccagatctagggacctgcagaatgcgggaacaggggcgtgtcctctggacctgctggcagggttttctcttctcgtggtaaccgtgcgcagctcccaagatggtgcagaatcagtgccgctgactgggaactggggctggctagaggcctcctagcctcaccttctctatatatctgtaaaatgggccccttcaccctgtcccaccctcctccccaggtcgagagagtcccaggcagccatgggctcgggacgtgaagttctcagcagacatttcccaagcccctcctctccctgcagcctctcttttcatcctcgcgtccaccccaaaggactcaccagtcatcatgacacccttttaaggacgagggaattgggaggcagggaagtcgactcttttccagggtcccacagtggtggtttcaaggcttctggctgagaagggggagcttagggggcctcctgatggcctgtcctaccccatcctgacaaccacctcagctggggcctacaggttctgggagagtggacacccagcccaagccacgtcagctgaggctgctgccccgtcacatcacagccccatcaaggacagagcagtcttcaggcccctggtgaggcggtgggcagtggggcagacagacgggtcccaagggcctgaggatcccctcctgccccttgcagtggctgaagggcttctggagcccagagctgtccatctttgaggtgacatggcactgagcaggtgtggggcaggtggcccttggcttgtctacctggatggctttgactcagagcctgaggtggacacgttggtggatgaaaagtccaaggaagataggtgcggtggatcacgcctgtaatcccagcactttgggaggccgaggcgggcggatcatgaggtcaagagttcgagaccagcctcgccaacatgctgaaaccccatctctactaaaaatacaaaaaattagccaggcatggtggagggcacctgtaatcccagctacttgggaggctcaggcaggagaatggtgtgaacctgggaggcggaggctgcagtgagctgagatggtgccactgcactccagcctgggtgacagtgcgagactccatcttccaaaaaaaaaaaaaaaaaaaaaatctgaggaagacaacaaggagggtggcggggggcaaggagaaggtgggagggcagtgacggaggagtggggtctgggggccccgcccaggggttactggtgtctcggctgcagataccaggatgaggaggtgagggggaaccccgaagtggattcagagaatggagaaaggaggaggaggtaaggattgagacaaggtggactgcgtgaaggaggtccctgggttcttgctcacaggatgtctgtatatccaggaggatgagggagacagtgagtgttgttctgggaggggaccgagaggttcaaggtagggccttgtgggctactgggagaacaggatcttcatccagagggccatgggaagccactgaagggtgccgggcaggagaggggaacaatcagaagagaccctggcagggcgtggtggctcacacttgtaatcccagtactttgggaggccaaggtgggtcgatcacctgaggtcaggagttcgagaccagcctgaccaacatgttgaaacctcatcgctactaaaaatacaaaaagttagccggggtggtggcaggcgcctgtaatcccagctacttggaggctgaggcaggagaatcatgtgaacccagaaggcggaggttgcagtgagagctgagagtgtaccattgcactccagcctggcactgccattgcactccggcgagactctgtctccaaaaaaaaaaaaataaataaaataaaaagaggaagaagagactgttttctgttttcagtcttggggtaagggcaggttggggagagtagggggtgggctaggggaccctggggctggcgagatgaggatagaagggagagggatcatggaggtaaaaccagcttccaagggatggctgtggatatcacctgggacttccatacctgggaggctggcttcaggggtgaggagaaagaccaggccatggagggctggccttgacccaccccactcctcagagctgggacatggtggaaattggtctggcagacagcaaggaggatgaagacctgagtccccagcctgcctccccaatcccaaaggattcttccccttaagtcagtatggggttcagggtctgggggtcttcaggccatcctggccagtccctgcactttctcaggaccagccttccagcctgtccccgaagctcctgggattttttctttttttgtctcccaggctggggttgcaatggtgtgatgatggctcactgcagccttgaactgctgtgctcgtgatcctcctgcctcagcctcccaggtagccaccacggctatttttttttttttttttttttaagacagagtttcactctatcacccaggctggagtgcagggtcttgatctcggctcactgcaacctccatcccaccgggttcaagcgattctcctgcctcaggctcccgagtagctgggattataggtgcccaccaccatgcccgactaattttcatatttttagtagagatggggtttcaccatgttggccaggctagtctccaactcctgacctcaagtgatccacccacttcggcctcccaaagtgctaggattacaagcatgagccaccatgcccagccatgcctgattattttttgtattttttttggtgggcggggaggtagagatgcgatcttgctaggttgcccaagctggtctcgaactcctggcctgaggcgcccctcctgcctcagcttcctaaagcactgagactgcagacattagtcacctctcctggttacgggattgctttttaattttctttatttttgagatggagttccactcgtattgcccagactggagtgcaatagcacaatctcagctcactgcaacttccacctcccaggttcaagtgattctcctgcctcagcctcccaagtagctgggactacaggtgtgcgccaccacacctggctaattttttgtgtttagtagagatggggttttaccatgtaagtcaggctggtctcgaactcctgacctcaggtgctccacctgccccagcctcccaaagtgctgggattacaggcgtgagccactgtgcccggccgggacttcttaaaagaaaactggagaccgggcgtggtggctcacgcctgtaattccagcactttgggagtctaaggcgggcggatcatgaggtcaggagatcgagaccatcctggctaacgcggtgaaactccatctctattaaaaatacaaaaaattagccgggcatagtggtgggcacctgtaatcccagctacttgggaggctgaagcaggagaatggcgtgaacccaggaggtggagcttgcagtgagaggagattgtgccactgcactccggcctgggagacagagcaagactgtctcaaaaaagaaaaaaaaaaaaagaaaaaaaaaaaaaaagaaaactggagagtccccatcccatttggtttctggacaagggagaacgctgccacagtgggtactggggacctcaaccacagctggaggtggggacctgggtcccaggattggggtgatgggaagacaggacacaggtgggctgtgaggcctgcacctgtggacccaggtggtcctcccaagatgtgatcaatccatgactgctgggctcgagcccactatgctttggatggacaagggatgggaacacagcataggctggctcatggcgccttctttattgtccaccccagccccccttccctgcagccccctccaaatgacaaaactacccacatcccatggcccacccccaaagcggcgggattcagagctgcgagaacactggaagctccccctctgacagcagcggcgacaccttgggtgcaagcggggccggatctgggtggggcagaggaggggggcgcctgagcctcagcgccttgggcccccgcccccctctccacccgcgcattcctcggccttacccgcgggggcgtcggggcgcggcggcccggccgcgggggccgcgggggcgccggggcggtggtcctccaggtgcagggtcatggcgggccgcgaggccgtggagaaggcgcactgcatgcacgagtagcggccgcgtgtgtgctcccacacgatgcggctcggggccgcgtgccctgcgggcaggcgggaccccgtcagtcccgggctcccccagcccagaagacccgtgcgccaaggatggaggacgccggcgagggtgggtgggactttttcccgccccccatcagcttccgggcgcctagttcagtttctcccgggtctgtctgcccctagagttgggggcacccaacttggcttctccgcgtcccctactatcatccccagattcactgttggggagaagcccgctccgaggtgaacggtgaaaggggcgcaaggtttatacgggaacgccggcgcagatgaaggcgcaggtgccagtcatttttaaggcaaaaatcctgtatttcgggacggtggcatttgtgccccctgggaaggggatgagcactgctgcctcctggtatccaccagaccccgcagggcgcaggaaagaaagcccctccacccctccctggtggtcacctgcacgcacctgagggcgcgtcggagccgccctggggtcttcgggggctgctgccagcacctgcggtaaaggggcgggtcaagttcagagtcagggcgagcccagccagccctcctggaggcccccgaccccacactcaccttggctctttttccagacggcggcgctggaagccggcggcccgggtgcagcggccaggaaggggcgcaggcgcggggggcttaggccaaagggcgcagggttcaagtagggcaggaacggtccggtgggggcaggggcgggggtcgtgaagggttccagcagcgggaacggcaggcccggcgctgatgcggggtcaacctccggggggcgctccggcgcgggcggctctcggtccagggccgggggtggcggcggggctgggctctgcgcatgctccgcgcaaacatgcaggtgcttgaagagcgagcggtgcgtgcggaagcgcaggaggcagttctcacacctggaggtgggcagagggctgggctgggctgggcctccaggggcaccagggagagtgtcctgtgcaatgccacccgcccttcgagcgtgggaacggagcctgggcactaatcacctccccgctcctgtacaactgtggcagcgacccttcctgaccacttcgggtgggaacctggggaaacccggaaagaagtctcaattttaagttaggcggccggttttccacttgggaggtaaagcctggctgggtggggccacgcccacgtatgccccgccccatccagggagttgagggcggggcttccccaaaggcccacccacatcaagtcccgccctccaacaccctgaccaggaagggaggaaggcctggagcccacacatagggtgaggctagggcagggcggagctcaagaggtcagggtctcacttgaagtagcgattgggtttgtagtgcagtttgctgtgagccaccagctcctgcatgctggggaaggtctcggtgcagctcagggctgagcagcggaagagcttgcctggtagggatgaaggacagagaagtggagacaggtggccaaggctggctccgaggggctccgcctgtttcccaccctaacctgcctccccattaccagtcctggccctaccttccagggactgtgtgggcgggcagtgggttcgcagatgctgtgccaggtcacggacgctgggaaaactgaggcagcagccagggctggagcaagggatttgcttccctgcaggacgcacagaacagtggtcactggtcccttcctcactagtgctgtccctgaccccagggttctgccccagagaagcaaatatgatgtgctggggcctttactctctgcctaccacaacagactggtctgccacagtgcaggggctggactggccaggctcaccattggagccacagcctggcatccaccggctgctccgtaaaatgatgagtggcatccctctagaaaggccctgaggttagagattctctacgtctcgcttctattgtttcagggactgtgattccccagaagaccccatcacagatcacctggaggtgggcgtcgtctgggaggccgcaggtcctcgctggtcccggagactatgctggtcaggccagggctgggtccggggccaggctggcagctgtctggggctggggaggagccctgctgcatccctccagcccctccacgttcccacactggcggtgtggctgcctgctcagggcctggctcctccgacatggaggaggaaggggctgcagctggcacagccggggacaacacctccttgtcggtctcactggagctgggctctgcagtggccagcatgtctgggatgggccctgagggtttctcctcctggtggaaggaagaggcggagagaacccttctgggctctgggtcaacccagtcggcccccatcctaaggaatcaccagcaggagaggataggggaatacgtaagggtggactaagctctttttttctttttataaagatggggtctcgccatgttgccctcactggtcttgaacccctggtctcaagtgatcctcctgcctcagcctcccaaagtgctgggattagagtcgtcagccactgcactggcccggattgagctccttatgcatacgggagaaacatctgctctcctcaactaggataggtgggagccccagtatgcacacaagcgtggcctagagggagtgggcggggccaaggctacggaggcggggctatgggcaggcatggactgggaagatgctagaggagctagacatggattgtctgaggaccgagaccggccggcctcgagcagtgtggacaatcttggaggtgctgggggcccggatgtaagaagtttaggggcggagtcctagcctgacgggcgtggtccattccgggccgggcccggaagtagggcgctctccgagtgacagccagcggcggacgggtgcccggatgtgggggcggggtcggccggaggctgtaggcgcgacagggccgctccccgccagtccccgcagctccgccgcgcccgcgaccccggtgccgcgctcaccatcttcgacacggctcggcctcttgtttctgcggctccggcggctgcagcttaggcggcggccaccctctgggcagtgcgagttcgcgctcacgtcagcgccattttccacctctcagctctcgcgagactgggggcggggcctgcgcagggcgctcggagagggggcggggcctgagggcagagtcaccctggagctcaggtcggacgctggtgcaatcttgctatctatccccgggcagtcagcgcgcacttcagcagactccgtgcacggagatccgggatgacctcgctgtcctagtcttcaaagtgggcaccttcatccctctagtcttgtcccaagatcagccctggacaggcgataaacagcagttctttctttatattttttatttttttttgagacagagtttcgctcttgttgctcaggctggagtttaatggcgcgatctcggctcactgcaacctccgcctcctgggttcaagcgattcttctgcctcagcctcccaagtggctgggattacgggcgcccaccaccacgtctggctaattttttgtatttttagtagagactgggttttaccatgttgtccaggctggtcgtcacctcctgacctcaggtgatccacccgcctcggcctcccaaagtactgggattacaggcgtgagccaccgcgcccggccagttctttattttttatagtgttgagacagggtcttgctctgtcgcccaggctggagtgcagtgatgcgatcatagctcgctacagccttgacctcctgggttcaggcgatcctcccatctcagcctcccgagtagctgggattactggcgtgtgccaccatgcccagctaatttttaaattctttttagagacagggtctctctgtgtgttgcccaggccggtctcaaactcctgggctcaagcgatcctcccgccttggcctcccaaatgttaggattgcaggcgtgagccacctcgcctccccttgcactcacattttaaaatggggaaacagcatcgctcgagccagggacgtcgaggctgcagtgagcgtgatggcaccactgcactcctgcctggtcgaaaaagcgagacccccatctctaaaagttaaataaaaatggggaaatagtaaatcaacaagtgcaaaaacaatcttttgtcctattcagagcaatgaaggaaacaatgaaatgtcgaagtgatgggtcagggaagccactctgaggaggtgacttcggagctgtctccagatgatcaaggagtgagctggtggaaagcccgaggagcagggggctctaccggatagctggtggtgatgtcctggagtggggcaggacgggcttattttggtcaaagagcagcgaggtggccagggcaccactggagcagagtggaggcggggtgtggaggtcagaaagcgaatatggtgcgcggcaggtcacgcagggccatgggagtggtgcagagagaggagtgtggtttatgttgtaaccactgatgaatttttagcagggggaggcgcatcatctgattcctggcagtcacttggagtaggatgggctgttgagagggcggtaaggtagatctaacatcttagatctctctgctgccatatcatctaagatgagatcatcttagatctcatcatgctgccattcaagaggtattcgttgagttctaggcaactgtagggttttttttgttttgttttgttttttttggacgacatcttgcactgcacccaggctggagtgcagtggcgcgatctcagctcactgcaacctccgcctcctgggttcaagcgattctcctgcctcagcctcccaagtaacagggattacaggcatgtgccaccatgccaggctaattttgtattttcagtagagatggggtttctccatgttggtcaggctggtctcaactcccgacctcaggtgatccgcctgcctcagcctcccaaagtgttgggattacaggcatgagccactgcacctggccacaattgtaggttttatgtgcagtgtatttccatctgcaaagcaagttgtacctatgcactttttttttttttttttgagacagagtctcactctgtcccccaggccgcagtgcagtggcatgatcttgcaagctccgcctcctgggttcaagcaattctcgtacctcagcctcccaagtagctgggactacaggcttgtgccaccacgctcagctaattttttttgtatttttagtagagacggggttttgccatgttggctaggctagtcttgaactcttggcctcagagatccacctgccttgggcttacaaagtactgggattacaggcatgagccactgcatccggcttttttgtttgtttttttgagacacagtcacactctgttgcttaggctagagtgcagtgatgtgatcacagctcactgcagcctcaacctccctgggctcaggtgatcctcctacctcagcctccctagtagctggtactaaaggtgtgtgccaccacacgcagctagtttttatatgttttgtagagatggggttttgtcacattgcccaggatgttctagaactcctgggctcaagtgatctatctgcctcagcctcccgaagtgttgggatttcaggtgtgagctactgtatccagccccctatgggcttttatatgcagagaatacctttaggagatatttaaaaactggggagaggaacagggatgtttgagtgggagagagactgagttttcacttttgtgttttttgaattattattatttttttctgtccaggcatggtgtctcaagcctgcaatcccagcactttgggaggctgaagtgggaggatcacttgaggccaggggtttgagactagcctgggcaacagagcaggacgccatctctaccaaaaataaaaagattagctgggcatagtggcacatgcctgtagtctcagcttcttgggaggctgaggtgggaggattgcttgagaccagaatttagaggctgcagtgagctgtgttcatgccactgcactccatcctgggcaacagagcaagaccgtgtctctaagaaaataaaacaaaaggccaggcacggtggctcacgcctgtaatcccagcactttgggaggctgaggcgggcggattacgaggttaggagttcgagaccagcctgaccaacatggtgaaatcccatctctactaaaaatacaaaaattagccaggcatggtggcacgtgcctgtaatcccagctactcgggaggccgaggcaggagaatcgcttgaacccaggaggcagaggttgcggtgagccgagatcatgccactgcactctagtctgggcaacagagcgagactcagtctcaaaaataaatacatacatacatgcaaaaataaaaaataaaacaaaaacaaattaaaattttttcttttaattattattcattcagttgaaaactcatttcatttaaaaaacaaagatcattttaatgcagggtaaggatgtgtgtgtgtgtgtgtgtgcgtgtgtgcaggggaggctagtgcaatctggggaaggatggggtgaggtggcagaagggacagggacccaaggaaggaagggagaggagggactggacttaagaaattttgtaaaagagtcaacaggatgtgggggtgagcagcaggcggggcacacatgactgaggtctgcagtctgaagatgcctgtaacctagataggagatgattatcttttagcatatgctaaacgtttaagataatggccatggtgccgtgcacagtggctcacacctgtaatcacggcactttgggagggtgatgcgggatcatgatttgattctgggaatccaaggctgcagtgagctatgatcataccactgcattccagtctgggacaacagagtgaaaccctgtctcaaaacaacagcaacaagaatcagatgctggagtgcagtggtgtgtgcctgtaatctcagctactgggggaaggctgaagtgggaggatcgcaggagcccaggtggtcgagaccagcctgggcaacacagtgagaccccatcttcaaaaaaagaaaaggaaattcagagatggaaagcactagggccattcaagagattgctaaatgcttttgtgtcatcattgagcaataaaagggcccttgagacccggttgcagccttgagaattttttccagccatgctcagcttcccaagacaggcacagaagggagaatagattctgcagaaggttctgctggccattcttgctgtctctctctctctctctctgtgtgtgtgtgtgtgtgtgtgtgtgtgtgtgtgtcacagtcttgttctgttgtccagactggagtgcagtggcacaacctcggctcactgcaacctccacctcccgggctcaagcgattctcctgcctcagcctcccgagtagctgggactatagtcgtgcgtatcatgtccagctaatttttgtatttttagtagagatggggtttcaccacgttggccaggctggtcttgaactccttacttcaagtgatctgcccacctcagcttcccaaagccctgggattacaggcgtgagccaccgtgcccggctgctagtcttgctttgattcctggctctactggggattcccgatgccccattcttccgttgggtaggtattctgtgcccgcagttcgctcatcacagcttagatcactctgtgcagtgcttgtcaaccaaatctgctgagaccgaccctctcccaccttcctggctcctgctgcaacgcccattccacctctgaattcccctcgcttctgtgggccagtcctcacctcaccagtcagccccatctctactggactggcttctctttgaggggctgagcacagagcgggtgtccatattagaaagctacaattaattattattattattattattattattatttttagagagagacagggttagctctgttgcccaggctggagtacaatgttgtaatcagctcactgcagcctcgacctgctgggctcaagtgatcctcccatctcagcctcctgagtatctgggaatacaggcatgacactagctttttttttttttgagatggagtctcactctgtcacccaggctggggtgcagtggcgccatctcggctcactgcaacctccgcctcccaggttcaagcaattctgctgcctcagcctcccgagtagctgggaccacgggcgcgcaccatcacgcccggctaattttttgtatttttagcagagatggggtttcactgtgttagccaggatggtctcgatctcctgaccttatgatctgcccgccttggcctcccaaagtgctgggattacaagtgtgacccaccgtgcccggccaattttaaaatttttttgtagagacagggtattagtaggttgcctagggtggtcaaaccttaagtgatcctcctgccttggcctcccaaagtgctgggattacagctgtgaggcaccatgcttggccaggatttggtttattttagtattagagacagggtcttgctgagttgcccaggctggagtgcagtgacgcgatcatagctcacttcagccttgaactcccgggatcaagtgatcctccagcctcggcctcacaaagtgctgggactacaggcatgcaccaccactcccaaaattcaggaatttttttttttttttgagacagagtctcactctattgctcagactggaattccatggtgcagtcttggctcactgcagcctccacctcctgcctcagcctctcaagtatcagggactacaggcacgtgccaccatgcccagctaatttttgtatttttagtagagacagggtttcaccatgttggtgaggctggtctggaactcctgacctcagatgatccgcccgccttggcctcccaaagtgctgggattacaggcatgagccactgcgcccagcccaaaattcaggatctttaggctcagaccatagcaggactccagtcttagtcccagttaggtgaagactaagagggcacagaaatgggattggggtgcagggggcaggagtgacccagagtgcattgagggtgggagcatgtggcatgtgggacctgcctctctccataggtcccagatgggtttggcggctgtagcttcaagactaacaggacctgctggaccatttgggatgcagattttggaagggaaactgagacaaattctttattttcttttctttcttttttttttttttgagatggagtctcgctctgttgcccaggctggagggcagtggcgcaatctcggctcactgcaagctccttctcccaggttcatgccattttcctgcctcagcctcccgagcagctgggactacaggcgcccgccaccacgcccggctacttttttgtatttttagtagagacaaggtttccccatgttagccaggatggtctcgatctcctgaccttgtgatctgcccgcctcggcctcccaaagtgctaggattacaggtgtgaggcaccgcgcccacctcctccctccctccctcccttccttcctttctttttttctgagacagggtcttgctctgttgcccaggctggagtgcagtggcatgatctcggctcacggcagcctctgcctcccgggttcaagtgattctcctgcttcagccttcccagtagctgggattacaggcaggcaccaccacacccggcttttttttttttcttttttaaatttttagtagaaacagggttttgctgtgttatccaggctggtcttgaactcctggtctcacgtgatctgcccgcctcagcctcccaaagtgctgggattacaggcgtgagccactgcgcccagcccaaactgggacaaattcaagctttatggtcacatatgaatgcaaggcatggctctgtgcagtcttgggtcagtgaacctctctgaacctccattgttccacctgtaagatggggtccttcacagctcctacctcacagggctgtgaaaacatcgtccttgttgggcacttagtaagttaactcgtgctttcacctggcaaaggtttattgccttagtgatgacagaatgagcaaagtcacgcttgttaaggacccccccctccccaactgtgcctggcactttgccaacagcacaggactcaagacccatttcttaatcacatggcagttgggaggtagattctgctgttagtcccctttgacacacacagaaatggagaatgggcagcaggtgtgatgttggaggaagaccagggcccaggggcgggggctgcagcagtgacctggtgacccagggcctgggcaggactggaggccaaaggactggacttttaggctattgcagcccaggtaaacgaggctctcattggcagggcctggctccccaccaggccggcaggcagataggcgggcgaaagagaaggcagtatcccagggcccagctcagatcttctccacgtagtttcctgggaaaaggccctcctggccgtgaagccggcccttccaccagcccgagggatctgtgggagagaggaaagcttgaggtgcccctagctggccctggagaaagctctcatgcctggtctgtccatcttgttcatggggactccctatgttgtccaggctggtcttaaactcctaggcttaagccatcctcctgcctcagcctcccaaagtgctggaattacaggtgtgagccactgcatccggccatttctactctttaaaagttttttttttgtaaatcttttgtagagatggggtcttgctaggttgcccaggcttgtctcaaactcctgacctcaagtgatcctcctgcctcagccactgaaagtgctgggattacaggtatgagccacctcgcccatctgttatctctgttctcccgtggggagggtgtgcagtggtggggtctgcctggcaatgtcagtcagggttctttttttttttttttttgagacggagtctcgctctatcgcccaggctggagtgtgttggcgcaatctcggctcactgcaagctccgcctcccgggttcatgccattctcctgcctcagcctcccgagtagctgggactacaggcgcccgccaccacgcccggctaattttttgtatttttagtagagacggggtttcactgtgttagccaggatggtctcgatctcctgacctcgtgatctgcccgccttggcctcccaaaatgctgggattacaggcgtgagccaccgcgcccggccgatgtcagggttcttaccactcccctcaccccagcttctgccctggtacacacaccttccatgaggatctcaatgacctcgttcacgttgaagctcagctcgtccacatcttggcccacgtactggtatagggcccggcacctgggaccatgtgtccgaggctggggcttgggtcggcccacaccaggcactggccgttgccccacgctgcgcttcctctgcatgctgtgggcacagggggtttgagtcacagccccagacactcccctaccccctgcccacctcctggagctgccctcccaccccacctacccggccatgccctggtcaggcacgttgaggaattctgtgttgtgctctgagggcggacgtgcccggggtcgtctgctggctcccagggatgtggacggagggccccggggaggcctgtgggtgccccctccagacatgatctccaggggcagggggccccctctggcagaggggggcaccccattgcgatccatgcctgtggcaggagcaaggatgaagacatgtattagggtgatgctaggaggatttgaggaggacttggcttcaagttctcaggctgagggaggagactgcgacactctcaacccagtgtggtaaggattgggccagacggagggactctgccgctaggagggcctagacagaagcttttttaagcataattttaaaattattttttacttttttttttttttgagatggagtcttgctcagtcgctcaggctggagtgcagtggcgcgatctcggctcactgcaagctccgcctcctgggttcacgccattctcctgcctcagcctcccgagtagctgggactacaggcacctgccaccacgcctggataattttttaaatatttttagtagagacggagtttcatcatgttagccaggatggtctcgatctcctgaccttgtgatccgcccgccttggcctcccaaagtgctgggattacaggcatgagccaccgcgcctggccaattattttttacttttatttgtttattttgagacatggtctcactctcgcccaggttggagtgcagtggtacaatcgtagctcactgcaactctgacctcctgggctcaagcaatcctccctccttagcctccttttaaggggagctgggactacaggtatgctccactatgcccagttgatttttataatttttaaagtagagatggggtctcactatgttgctcaggctggtctcaaactcctggcctcaagcaatcctcccacttcggcctcccaacatgctggttttacaggcatgagccactgtacttggccttatttattttttatttgtttagagacagggttttgctctgtggcccaggatggagtgcagcagtgagatcatagctcactgcagactccaactcttaggctcatgatattctcccctctcagcctcctaaatagctgggactataggcacacaccaccatgcccagctaatttaaaaagaatttttaggctaggcgcggtggctcacgcctgtaatcctagcactttgggaggctaaggtgggctgatcacgaggtctggagtttgagacaagcctggccaacatagtgaaactctgcctctactaaaaatacaaaaattagccaggcatgatggcgtgtgcctgtagtcccagctactcgggaggctgaggcaggagaattgcttcaacctgggaggtggaggttacagtgagccaagatcacgccactgcactccagcctgggcaacagagcaagacaccgtctcaaaaaaaaaaaaaaaaaaaaggccgggcgcggtggctcacacctgtaatcccagcagtttgggaggccgaggcgggtggatcacgaggtcaggagttccagaccagtctggccaacatggtgaaaccttgtctctactaaagataaaattagctgggcatggtggtgcatgcctgtaatcccagctactggggaggctgaggcaggagaatctcttgaacccagaaggtggaaagttgcagtgcgctgagaccgcaccattgcaccccagcctgggcaacagggctagactctgtctcaaaaaaaaaaaaaaaaaaaaaatctaggcgtggtagcacacgcctgtagtcccagctactcagggggctgaggcaggagaatcgcttgaacccaggaggtggatgttgcagtgagccaagatcatgccactgcactccagcctgggtgacagagcgagactgtctcaaaaaaaaaaaaaaaaagaaagaatttttggtagagacaggatcttgctatgttgcccaggctgatcttgaactcaagtgatcctcctgccttggcctaccaagagtgcttggattacaggtgtgagccatcttgcctggccaggagtggctttgcaggggcaagtttccctcctcctatcctctgtaggagagcttctgtgggtacgtcttggtggataaataagagctcaacgaatggaatgggaatttgagagagaagcagagaaaacggcccaaaggcctggaggtaagaataaattttgtgaattgggaaaataagatgtagtttgaggccaggcgccgtagctcatgcttgttaatcccagcactttcggaggccgagacgggcgggtcacctgaggtcaggagttcgagaccagcctgaacaacgtggtgaaaccctgtctctactaaaacgatacaaaaattagccgggcgtggtggcgggtgcctgtaatctcagctactcgggaggctgaggcaggagaatcgcttgaatccaggaggtgaaggttgcagtgaaccgagatcgctccactgcaccccagcctgggagacagagttggactccatctcaaaaaaaaaaaaaaaaaaaaaaagatgtagtttacagggcaggagtgtagggtaggaggagagaagatgtcagtggttagctgggtttgggttttgaagggctctgaatgccaaactaagtttagcctttattctgcgggagatgtggagctacggagagtcctggacagagaagtgagtggtaaactgtgtttgttagatttcgtttgctgaaggtctggcttaggccatgggacccacaacagacaagggaatatagcaagggacgcagctcctcacctctggggggcgcaggggccgcccgggtaggggcttgggacgacctccgaggttttcccttggccattcccttccgcgtaggctctgaaagaagagtgtcagggagttgaatgacagacagaccacgctctttgccccgcccacaaatctagtccattctgaggctccgccgcaccccgccccctcaggctctcccattagcaccgccccttaggtacagttacactggctccgcccactaattggcctcgccccccaagggcccaacacctcactggccttgctctttgggcccgcccactttaggtcactccttcatcactacccagttccagggttgccgctctggccgcacccctctacatttctcgcccccgcattggtcatgtcttctccttaacagtctttctctctctctagacccgccccttccttgctgttgccctctctggtccagcctgctggccccgccccactattttgattggtttcctccatggccacgtccctcctccacatttcacgcccactaattggttgcggcctttgtttaaaagtctgtctctctggccgggcgcagtggctcacgcctgtaatcccagcactttgggaggccgaggcgggtggagcatgaggtaatgagttcaagaccagcctggccaagatggtgaaaccccgtctctactaaaactacaaaaattagctgggcgcggtggcaggcgcctgtaatcccagctactcgggaggctgaggcaagacaatcgcttgaacccgggtggcggaggttgcggtgagccaagatcgtgccacaacactccagcctgggcgacagagtgagactccgtcttaaaaaaaccacaaaactcaaaagtctctctctctctctctgtagacactccccttcctggccttcgtccactcttaaccagcctcgctggccccgccccctctgccctagttccgcgcagactcactggagctcttgggcagcccatcgcccacgctgaccgtgagggtccgaccgccaaccttgagcactgccaagtcgccgaagccgcgggagaaggtgacgctgcgggtgccgccaccgccccagccctccttcttcacccgaaactgtagtctatggggagagaagaaagcttgggggcgctggctgaggtcccccgccccacccaactctcgctggttggggcaggggcggggccgcggccggggccgaagcgcagttcggccgggtcggtggggcgggagagggtgcgccgcgccgagaccaccccgagatggtgctggggttggcggggccgtacgtgtcgctgaaggtgaggggcaggggcctccgcgtcgcctcctcgaagcgcttgcacagaaggctgacaaactcggtcttgaagacgctctccaggaagctgtcggcggcatcctcttggaggatgaagaagtcgtcctgtcgcgtgctggggaggggcgggtgagagcgtcaggtgggacacaggtgagggcgacaggtgagagagacagatgaaggtggctgaaggtggatttagggaagggtcagctaagggccaagtcagcggtgaccaggtaggagaaaaagggggatgtggcaaggagtggaagaggtggttacagaagagggccaggtgaggtctagtaagagggtaaggtgcaggacggaaggatttggcatctaaggatcatgagcatagggggcaggtgaacatgacaggtggggccaacagagggctacaggcatggcaccaggtaagattgtcagggtaacagacggggtcactagaatgagggcagccaggggacaggtgagagtgactgtgcggcaggtaaggacctggcttcacctgagggagactccccgcagagcctggatgtccactttcttcttcaagacttcacacacctggcccttctcaggtcccttcttcactttctctcgcccaatcacatacacacacttgggcgtcaggatcaagtcccgcttgatgggctgtggggatgcaggattagaggctgatgcctgtagcctggccagcctggccacagaggatccaccccaggcagaggggtggtgctggcaggtcaggtgaggaaggtgggagccctccaggtgaaggtgtatgagtcgtctgttttgtagacagggtctcactctgtcgctcaggctggagtgcagtggtgccatcatagctcactgcaacctccccctcctgggcttgagtgatccacctgcctcagcctcctgagtagctgggaccacaggtgcgcaccaccatgcccagctaattttggtattttttgtagattcagggttttgccctgttgcccaggctggtcttgagctcctgatctcaagcaaactgtcctccttggcctcccaaagggttgggattacaggtgtgcgccaccacgcctggccatgagttgttatataagaaacagaaggagggctgggtgccatggctcacgcctgtaatcccagcattttgggaggccgaggcgggcagatcatgaggtcaggagtttgaaaccaggctgaccaacatggtgaaaccccgtctctactaaaaatacaaaaattagctgggcgaggtggtgggcacctgtagtcccagctactcaggaggctgagacaggagaatcgcttgaacccaggaggatgaggttgcagtgagccgagatcctgccactgcactccagcctgggtgacagagcaagaccctgtctcaaaaacaaacaaacaaaaaataacagatcaggcgcggtggcacacgcctgtaatcccagcactttgggaggctgaggtgggtggatcacaaggtcagaagattgagaccatcctggctaataccatgaaaccccatctctactaaaaatacaaaaaactagctgggcgtggtggcacatgcctgtagtcccagctactcgggaggctgaggcaggagaattgcttgagcctgggaggcagaggttgcagtgagccgaggttgtgccactgcactccagcctgggcgacataacaagattctgactcaacacacacacacaaaagagcaaaactctgtctcaaaaaaacaaaaaagaaaaacaaaaaagaaacgaggtcagatgggaatgtgttggttggttggttggctagaaaagggtgtttgggtcagtgaacaggtgctgggtaggtaaggcacctgctggacatgggttcccgggccagatgagaacacttagaccaggtgaaagtacttgggtcatgtgactgtagccagctcaggtaaaggtattatggttcaggtgagggtgtacaagtcaggtaaataggagtatctggatcatgagaggaagtgagcgggtgtgtatctgaactctatgagtttgtacaggaaggcaggtgagggtgtacctggtagaagggtgaatgtgcaagccggttgagctggcctgcggtcagagttctctgggtctagtggggatacctgtctcagtgaaaacatttaaggtgatggtatacaggtcacctgagagggcatacctgccacacagacctgtccaaagcaggtgggtggatcaggtgaaggtacccaataatgtgtgtctggtatgtgaagttgtacagatcatgtgaggaggcacctgccacataaacttgtccaaggtaggtgagggtgtccaggccatatgagactatccatccaggtaaagatggtatataggtgatctcagtgtgtacctgccacacataggcctctctaaggtgagggtagggtgagttactgggctaggtgactctctgggacatgagatatgggtcaagtgagtgtgtacctggcccgcccaggtacaggtgacggtaaacaggccaagtctgggtgtacctgtggacaggagagtccaggctaggtgattagagtacacgtaggttcagggctgtctggggcagaagaggatgtgtctgttggtggaggtgcccagctgtctatgccaagcatgaatgcacgggtcaggtgatgtatccctgtagagagcatgtacctatggactaggctgcctgggccaggtgagagtgtacctgtggacaggtgtgtctgggccaggtgaaggtatatctaatttccaggttgaaggtagagtgtacctaatggatgggtgtgtctaggataggcaagggtggcctcgtggttggggcttctagacaaggtgaatgaatgtgtgattgttgagagatgcatctggccaggtgagggtgtatctgacaggtgtgtctgggctacaagtgcatgtttgatggacagctgtgtctgctatacttgagtgtatacctgtgggcaggtgtgtctgtgccgggtaatgatgtacctgtgatggaacagattgatctaggctgggggatagatacctgtgggcaggtgtgcctgggctaggtgaggatatacctgtgatggaacagatggatctaggctgggggatagatacctatggacaggtgtgtctgtgccaggtgagggtatacctgtgatggaacagatggatctaggctgggggatctatgcctgtgggcaggtgcatatgggccaggtgagggtgtacctgtgatggaacagatggatctaggctgggggatatctggctgtgggcaggtgcatctgggccaggtgagggtgccaggctgtagtcagggtcttgctgtgcccacccactagtgcctcaccttgaagcggcggtcgtacttggtgaccgaatcggcgaagtccacccgctccctcttgcccaggaactgacgcagctcgggccgctcctccagccccaggtagtccccgacgaagttccgattgatgctgttgcgcctccgctccttcttgttcagcaggatgttggaagctgcggggacagagggtggagggcagagctcctgatacagctcctccaggtccttgtgcccccaccccgcgccgtttacccgaagcctctcaccttcctcccgcatctcctcgtacttccggacagccacgtggcgccgccaggccttctggatggttcgggcaaagccatcgaactttcgctctcgcacctcctccaggaggaaaagctgggcgggggtcgtggggggcaagggtgagtcctggtgtctccccaggggctgcagttccgggttttccctgcgctcaccctactcacacgcttttgctcacccatccccacacatgtgctaatttttttaagaggcggggtctttctagtgacactcgttcataaagaaaagaagaaaaaggggccgggcgcagtggctcacgcctgtaatcctagcacttcgggaggccgaggcgggtggatcacctgaggtcaggagtttgagacgagcctgaccgacatagtgaaaccccatctctactaaaaatacaaaaagaaattagctgggcatggtggtagatgcctgtgatcccagctactcgggagcctgaggcaggagaatcacttgaacccgggaggcggaggttgcagtgagctgagatcgcgccattgcactccagcctggacaacaagagtgaaactccatctcaaaaagacaaaaaacaaaaacaaaaaaagctggtggctcatgcctataatcccagcgccttgggaggctgaggcgggaagatcgcctgaggtcgggagtttgagaccagcctgatcaacatggagaaaccctgtctttactaaaaacataaaattagccgggcatggtggcacatgcctgtaataccagctactcaggaggctgaggcaggagaatcacttgaacctgggagttggaggttgcggtgagctgagattgtgccattgcactccagcctgggcaacaagagcaaaacttcatctcaaaaaaagaaaaaaagaaaaagacagggtctcgctccgtcgcccagactggagtgtggtggtgcagtcatagctcactgcagcttcaacctcttgggttcaagtgatcctcccacctctgcctcctgagtagctgggactacagctgtgagccaccatgcccagctaattttgtggtgatgtggtcttgccatgttgcccaggctggaaaaatttttatcttcctccaaatgactggacctccctgtgcgtctctccccatgtggggtacacacttctgccttacatgataacagtgagtcactagcttcagatcacagctgtgccacttactacctgtgtgcttttgcaagaaacggtatgatgtcacggtttcttacactgttactcgacactatccacgaggtacactgccgtgtcagagatggtagaaataggaaccagtgtgcatcttggaaaaccaataaaatacagtaaatatgaaaatgtggccgggtgcagtggctcaagcctgtaatcccagcattttgggaggccgaggtgggcggatcacctgaggtcaagagtttgagaccagcctggccaacatggtgaaaccccgtctctactaataatacaaaagttagccgggtgtggtggcgcatgcctgtcatcccagctactcgggaggctgaggcaggagaatcgcttgaactcgggaggtggtggttgcagtgagcggagattgcgccactgcactccagcctgggcgacagagtgagactcagtcccccgacccctgaaaaaagaaaagaatgaaactccatctcaaaaaaaaaaagaaagaaaaagaaaatctgatgtgtagaactgtgatgtgactagcaaccgtgtggttgggcagtgtacaacctgcacagccatccgtagcaggcccagaaaggaagcttttgcagaaagcagagaaaagggttttgagttgtaaaagtctagacccagaggggacttagagaatgaattacattacagcaagtcaaagtacaaagtctaagaggaatgtctactcatttgtaataacagcaggtgaacaaggtgaggaacctactggatattaaaatactgtaaatctatagtaataaaaacaatagcatgcctgtcagagaatagaatgattaactggaatagggcagatgcttgagaaacatcctacttcaaagagaaactgtgatcaaagggacaatattgtcaattagtgaagatgggaaataatgcaaatataggctgggtgcggtggctcatgcctctaatcccagcagtttgggaggctaaggtgggagcattgttgagcccaggagttcaagaccagcctgggcaacatagaaagaccccgtctctacaaaaactaagcaaaaattagctgagggtgatggcacgcatgtgtagtcccagctattccggagggtgaggtgggaggattctttgagcccaggaggttgaggctgcagtgagctgtgattgtgcgactgcactccagcctgggagatagagtgagatcctgtctcagaaaaaaaaaaaaatacacacacacacacacacacacacacacacacacacacacacacacaattgggctttatttagaaaaattagcacttcacccagagtgctttcccaagtccataggtagcacattgctgctaagagccttgctccctgctctgctgaccaaaatagttttaattttttcagagacagggtcttgctctgtttcccaggctggagtgcagtggtgcgatctcggctcccgggctcaagggatcctcccacctcagccactcaaggctaattatggtattattatatatatatttttttggtagagaggtagagttggggttttgccatgttgtccagactcgtctggaactcctgggctcaaggaatctaccagccttgacctcccaaagtgctgggattacaggcgtgagccagcgtgcccagcctcagattcttcttcttcttcttcttcttctttttttttttttttgagacggagtcttgctctgtcgctcaggctggagtgcagtggtgcgatcttggctcactgcaagctccgtctcctgggttcacgccattctcctgcctcagcctcccgagtagctgggactacaggcgcccgccaccatgcctggctaacttttttgtatttttttagtagagacatagttttgctgtgttagccagggtggtctcaatctcctgacctcatgatccgcctgcctcggcctcccaaagtgctgggaattacaggcgtgagccagcacgcttagcctcagattcttctttaaaacctttagagagtatggccatgccaacaccttgattttggacttctgacctgcggaactgtgagagaataaattgctgttgtgttaagccatggagtttgtggaactttgtttcagctgtcccagcagactattataacatacctgggatgctgggccacaaaggccaacaggcagataaaatgtttgaggatggcccaaaccatgttcataagaaaatcaaaataggggccgggcgcggtggctcatgcatataatcccagcactttgggaggctgaggtgggcagatcacttgaggtcaggagaccagcctggccaacagggtgaaaacccatctctattaaaaacacaaaaattagcctggtgtggtggcgggtgcctgtaattccagctacttgggaggctgaggcaggagaattgcttgaaccaggaaggtggaggttgcagtgagccaagattgcgccattccactttagcctgggtgacagagcgagactctgtctaaaaaaaaaaaaaaaaattcatcccaacatgaatgcatttttggttgagaaaggctccaactccattaagctaatttaatttcttgattactttttaaatatagcacagttaaaccgttggctatttttcttttcttttcttttctttttttcagagtctcactttgtcccccaggctggagtgcagtggcgcaatctcagctcactgcaacctctgcctcccaggttcgagcaattctcctgcctcagcctcccaggtagctgggattacaggcacgtgtcaccatgcccggcttattttgtatttttagtagagatggggtttccccatgttggccaggctggtctcgaactcctaacctcaagtgatccaccaccctggcctcccaaagtgctgggattacagttgtgagccaccgtgcctggccttttcttctattttcattttactaatttttttttttttgagatggagtctcactctgttgcccaggctagagtgcagtggtgcgatctcggctcactgcaacctctgcctcctgggtttgagtgattctcctgcctcagcctcctgagtagctgggattacaggtgcgcaccaccacacttggctaattttttgtatttgtagaagagacggggtttcaccatgttggtcgggctggtcttgaactcctgacctcgtgatccactcgcctcggcttcccaaagtgttgagattataggcgtgagccactgcacccagcttattttactaaaattaaattactgttgcccaggcttgagtgcagtggcacgatcttggctcacttcagcctctgcctcctgggttaaagtgattttcctgcctcagcctcctgagtagctggtattacaggtgtgcaccaccacgcccagctaatttttgtacttttaatagagaaggggtttcaccatgttggccaggctggtctcaaactcctgacctcaagtgatccatccacctcagcctcccaaattgctgagattacaggtgtgagccagtgcgcctggccagcaagattattttcatcaggattattttctttcttttataaatattcagtctgtctttgttgttgatgttcttataggattttaccactaagcatctgccatcgtgaatttcattatttctaccccgtccgtcttctccaaatcaaaatctatagactgaaatttttgtctaaattaaattttactttatatagtctttgctggtgatagttatttttcttttttctttttgtcttttgtagagacagggtctcactatgtttcccaggctggtctcgaactcctggcttcaaaccatcctcctgcctcagcctcccaaagcactgatattacaggcatgcgctaccacacctgacttggtgctagttttattttgccttttttctgttctatgtcaaaatttttggtctatttcttccagagtgtctctctcaatctctctctctcaatctctcaatcacattctttctttcttttttttttttgagacggagtctcgctctgtcgcccaggctggagtgcagtggcgtgatctcggctcactgcaacctctgcctcctgggttcaagccattcttctgcctcagcctcctgagtagctgggaccacaggtgcccgccaccatgcccggctaattttttttgtatttttagtagagacgcggtttcactgtgttagccaggatggtctcgatctcctggccttgtgatccgccctcctcagcctcccaaagtgctgggattacaggcatgagccaccgcgcccggcagtcgcagtctttcttaatctctcgctcagtctctctcagtctcttactttcagtctattaatctctcacttgctttctcaatttctctctcaacctctatctcagtttctctgtcaatccctctctctcaatctgtttctcaatttctcaatctatcagtctttctctcaatctctgtctccctctgtctctctctctctctctcagtccctctctatacctttctctctcttcccctctccttctctgcctgtccctcaaacacactcaccgactctgggttcttgacaaagaccttggtgctccccatctggtactggtcgggctccatgttgaccgcccgaagcaggtgctggacgccctggcgttcgtccccacgccaccgcggccacgtctcgggggtcagaatggcatacctgagggcggagggctggggtgtgggagtgctcatagcagacaggcctggctgggcgttctgatgaaggggatggcgagggcgggggtggagggctcctcacctctgcaggaatttggcgaactggcggcggtaggcgaagccggctctgcgcaccctgatgttctccttcaggcccaggtattccacctggtgcttgactctggtggggagggtaggctgagtcccctcggggtggggagtcaccagtcctgggggtgggtgggaggtgctggaggtgggggacctggggggatctggattcatgctgagggaagtttggggggtgagttctgtggtctgggggggcttcgggggtcagcctggggactggggggagggatcttgtcctgatggtcccttctggggtcagttctgcaggtgggggattgtgggaggggctgtgctagtccctgggtcatcctacaggaggtcagggaggtgtctcggtcagttctaggggtaactgcagggcctggggggaatgaatcttggattggttgggggggatcacctgttctcctcccagtctcggggcctcttggtctcgttgggtttgatgcagcggatgtagtggggtgtgcacctcatcagtgtggccaccaggtcgttggcttgtttctgaggcagaagtgaagacgggtgggtggggggcacagagatgggaccctctggcccctcttttttccaccctggatacagtcccaatagacagagactgggggtgggtgagggctggtaacagataagccacaggggccagatgtccctggtctgtgtgcacctccactagtgcacaccacactagtgggactgatgtggggtgtctgcctgaccctggaacccaagacaaggagctctcacgtctaccgcactcaccacttaccttggcacatagtaagtgctcagtaaatgtttgttgactgagtaacagagcccttatgagagcatttctttttgtcctttggggagataggtaccttgggtgtttgttttttttgttttgttctgttttattttgttttgagatggaattttgctctgtcacccaggctggagcgcaatggtgccatcttggctcactgcaacctccaccacctggatccaagagatccttctgcctcagcctcccaagtagctgggattacaggcatgtgccaccacacccggataatttttagtagagacagggttttgccatgttggtcaggctggtcatgaactcctgacctcaggtgatccatccacctctggctcccaaggtgttgggattacaggcatgagccactatacctggctgggtgattttttttgagacagggtctccctctgtcactcaggctggggtatagtggcgccgtgatagttcactgtagcctcagcctcctgtgctcaagcgatcaactgccttagcctccggagtagctaggattacaggtctgagccactgtgcctggctaagacatgtactttggaggtagggaaactgtgtgtatgcctgagaggtttgccttgggttttgcattttgttttatttttatttttatttttatttggagacaaaatctcgctctgttgccaggctggagtgcagtggcatgatctcggctcactgcaacctccgtctcccaggttcaagtgattctcccacctcagccttccgagtagctgccaccacacccagctcctttttttttatatatatatttttagtagagacggggtttcaccatgttggctgggctggtcttcaactcctgacctcaggtgatccacctgcctcagcctcccaaagtcctgggattacaggcttgagccactgtgcctggcttgcatttttattttattttattttagtatttatttattaatttatctgagacagggtcttgctctgtcatccaggctggagtgcagtggctcttggctcactgcaacctccatctcccaagttcaagcaattctcctgcctcagcctcctgagtagctgggattacaggcatatgctggctaaattttgtatttttagtagagatgggctttcaccatgttggccaggctggtcttgaaatcctgacttcaagtgatctgcccgattcagcctctgaaagtgctgggattacaggtgtgagccattgctcccggtctgattttttttttttttttttttaagagacagggtctcactctgttcccaggctaaagtgccagggtgcaatcatggttcactgcagcctcgacctcctgggctcaaatgatcctcctgcctcagcctcccaagtagctgggaccacaggtgtgcactactatgcttggctaatttttaatttattttttatagagacggggtcttgttttgttgcccagactagatttgttgtcacattcatagcaacagaatggtgagtgccagggacttggaaagcagataggcagtgtttcctggggacacagtttcagtttgggaagatgagaaagttctggagatgggtagtggtgatggttgcacaaccatatgaatgcacttaataccactgaacattaaaactggttaaaatattattagataggctgggtacagtggctcacgcctgtaatcccagcactttgggaggctgaggtgggcggatcacctggggtcaggagaccagcctggcccacatggtgaaaccccatctctactgaaaatacaaaattaggccgagcgcggtggctcacacctgtaatcccagcgctttgggaggctgaggcaggcggatcacctgaggtcgggagttcgagaatagcctggccaacatggtgaaaccctgtctctactgaaaatacaaaattagccgggcatggtggtgcatgcctgtaatcccagctacttgggaggctgaggcaggagaatcacttgaacccaagaggcagaggttgtggtgagccgagatcacgccattgcactccagcctaggcaacaagagtgaaactccatctcaaaaaaaaaaccaaaccaacaaaaaaacaaaattagctgggtgtggtggcgcatgcttgtaatcccagctacttaggaggctgaggcagaagaatcacttgaacccaggaggcggaggttgcagagggcccagattgtgccactgcactccatcctgggtgacagagcaagactctgtctcaaaaaaaaaaattattggatattattaagatgataaattttatgtcatgtatattttaccacaaatttaaaaaatggtaaatgactaaagaccaaacaaaaatgtattagaataatggtctacttctgcattgaaggagttgatggagacctccaagaagctggttcaagctccctaaacccagagctggaggaagaccctgctgaacagatgacgtcacagtcagaggcagaagccccaggattggtagacagacagacgttggaatgagagaaacagagtccggaccccaggtagggtggaactcagccctctgcaggcccagctccccgttgtacaccccaggcccaccttgatcttggagccggcggtgctggggcgccccttcttgtctccatccagcttctcggggaagagcatccggaggaaggccctgggtaggaaaggggagaggaggagttggaggtatggctagactttcgggtactcttcctccaggggtggggcagcctcaatgccgcaacgcaaaatatggttctctcaatgtggaggggagctgtgatgggtgagatgcagagggttggttttttggtttgttttttgaggcagggcctcgctttgtcctccaggttggggcgcattggtgcgatgataggaactgcagcctggaactcctgggctcaagccaatgtgtgaatgtattgaatgccactgaattgtacatttcatttcattttatcttattttatttatttatttatttcctttattttttctttgtcacaaaaagggaacaacacggataaattgtacattttaaaatggttaataaggccgggtgcggtggtgcatgcctgtaatcccagcactttgggaggctgaggcaggtggatcacctgaagtcaggagtttgagacaagcctgaccaacatggtgaaaccctgtctctactaaaaatacaaaaattagcggggcatgatggtgggcgtctataatcccagctactcgggaggctgaggcaggagaatcgcttgaacccaggaggtggaggttgcagtgagccgagatcgtgccactgcactccagcctgggcggcagggtgagagacactgtctccaaaaaaaaaaaaaaaaaatcggattgtggtgatggttgcgcaattctgtgaatttgctaaacgtcatggattgagacactgcttaaagtgggtggatttaatggtaagtgctgctgaaacccttacgtgcacatggatccctgggaggcatgggtgcatcctggcttaaagatcaggttaggttccgatagttctaaacctgattgttcagattctgatagttcagaatcagatgcagattctgattctggaggtctggggtggagtttgaggttctgccttttttttcccctcagagataaggtctgttgccaaggctggagtgcagtggtgcaatcacggctcactgtagcctccacctcctaggctcaagtgatccttctatctcagcctcccgagtagctgggactataggcatgtgccaccacacccagctaattaattaattattattatttttgctggcagagtagacaagcatttaaaaaaaagaatttttttttaagagacaggggtcttgctatgttgcccaggctggtcttaaacttgggacctccagtgatccttctggctagggagattctgcactggaaacaaggcccaaggatgctcaggttgctggtctaagaaccacatgtcaaacactttaaggatccccgtcttattactttacatctaatgctatgttctttgtgtgtgtgtgtgtgtgtgtgtttttttttttttttttttttgagacagaatctccctctgtcgcccaggctggagtgcagtggcacaatcttggctcattgcaacctctgcctcctgggttcaagagattcttatgcttccacctcctgagtagctggaattacaggtgcgcgccaccacgcctaggtaatttttataattttagtagagacaaggttttgccatgttgcccaggctggtctcaaactcttggcctcaagagatttgtccacttcggcctcccaaagtgctgggattacaggcgtgagccactgcgcccggcctctggagttactttttacatcagaactagtccatagaaacaccatcctggccgcacagccactcccctcgagtttgtggcgagatggcagttctgggtaagatggagtggggcccggtcctccctccatccccttggggggttgtagccggaggtccccatgcctgggaccactcactgctcactggtctgcatcagctctatgaggtcggagaagagaacgtctcggttcctctcgcagaagccgctgacgtcgtaggagacctggaggggacagtgctgaggacagtgagggactgagaaacctggctgggagggtgggcgtggggtgcttacagcccaggtggtcaaggctttcctggggcctgctgtggggtgagaggatcaggcagtgtctacagcgctggctggggggtatctacagttcagaataggggatggggggcgggcttcctggagagctgatgttcaagttgaggttagaggatcgtggctgtatcccaggtcagaggtaaggggaggtgggggttacaacctagatgagccaggagagagctgcagcttgcatcagaggccggggggcggtgaaagttatagctcagattggtgggtggggggctgcagcctggcgggggggtccctgggagtcagaggtcagattggatatctgtgacctggtcaatcaggggccagtgcagggggcctgtgtcaggagggtaacagccctgtctcagggatctctgggggcatttcagccagggttgggggctggagctgctaccaaaggttagggccctctgtagttctgagcagggcttttgcaaccctggctgagggaacatgggagctccagccgtttttgtttttgtttgtttgcttttttttttttttgagaaagagtcttgctctatcacccaggctggagtgcaatgacacgatctcagctcactgcaacctccgccttccgggatcaagtgattctcctgtctcagcctcccgatgagctgggattacaggcgtgtgccaccacacctggctgatttttttttttatttttaatagagacggggtttcaatatgttagccaggatggtctcgatctcctgaccttgtgatccgcccgcctcagcctcccaaagtgctgggattataggcgtgagccactgcacccggccctgtttgcttttgttttgtgagatggagtcttgctctgttgctcaggctggagtgctgtggcacaatcttggcttactgcaacctccacctcttggattcaagtgattctcctgcctcagcctcctgagtagctgggattacaggtgcccacgaccacgcccggctgatttttgtatttttagtagagactgggtttcaccatgttggccaggctggtcttgaactcctgacctcaggtgatccacccgcctcagcctcccaaagtgctgggattacaggcgtgagccaccactcccagcctctccagcccattttaggggcactcctaggaacttctgctctcatgttgtgagatccttggatcactgcctgagagtgtagtcctgtcttttggggagtggggctgcgggcatggttagagtccagtggatttctgtagccttcggtaggggtctgtaggaggcttcagcacattttgaaggctggtggctcacaggaggggcctgggggctttggggatttcctctccaaattgggatcagaaggtggggggctgtgtcctagtcagggggttatgactcacattggggcttatctgaacataggcagtctggtacccaagctggtgttaatcggggggaattctgttccctctgttaggggagttgatgtgtaagggaagctgtggcctggatcagaggtcagggtttctgcagccctggcccagggaacacggtggtggtggtggtgctggtggtggtggtggtggtgctggtggtggtggtggtggtggtggtggtggtgctggtggtggtggtggtgctggtggtgctggtggtgctggtggtggtggtggtggtggtgctggtggtgctggtggtgctggtggtggtggtgctggtggtgctggtggtggtggtggtggtggtggtggtggtggtggtggtggtggtgctggtggtgctggtggtgctggtggtggtggtggtggtgctggtggtggtggtggtggtggtggtggtggtggtggtggtgctggtggtgctggtggtggtggtggtggtggtgctggtgctggtgctggtggtggtgctggtggtggcggtggcggtggcggtggcggtggcggtggcggtgctggtggtggtggtggtggtggtggtggtgtccagacaagtttggggcttagagagttcctggggggtcagccggaagggtctgtagttctggttagtagggggtggattgaggcgggggacagtggaattctacagccctggataagggtcctagcaggctctttccagcctgggtgctggagggtgggggctacagcctggagccctgggggtctgcgaggaggcacagggtagggtaggggcagggggcgcaccttgccagcgtagtggtggatgacgaagccggcgctccagctgttgaaatgctcgtgggtccccacagccgcctgcagcttctgcagcagtgtctggtctgctcccccgcccgtggcgtgcatggtggcgcacacgtcgtccaagacgctcatgatgcctggggggctctgcggggcgagcgggagccagcagcggctcagtttggtctgccttgcctccccacagctcgtcagtgcagagattaggggagggagggggtggaggagtggagggagctagagctttgggggtggggagggcaccaggggcttcaaatacaagcacaaaaggcgttgcaggggtcagggatggaagggataggggggcaagggtgtgtggggctactgtggaagctcgctgaggtgcagaagtgggtggggacccctcaagagattcaggccccagactagaatcccttggtagggggacctgccttatgtatttatttatttatttagagacggagtcttgctctcttgcccaggctggagagcagtggcgtgatctcagctcactgcagcctccatctcccaggttcgagtgattctcctgcttcagcctcctgagtagctgggattacaggcatgccgccaccatgcccggctaatttttgtattttttagtagagatggggtttcaccatgttggccaggctggtttcgaactcttggcctcaggtgatccacctgccttggcctcccaaagtgctgggattacaggcatgagccaccatgtcccgcctaaatacgtcttaaatttaattttttttgagacagggtcttgttctgttcctcaggctggagtgtggtggtgcaatcatagctcactgcacccttgacttcctgggctcaagtgatcctcccacctcagccttccgggtagctgggattacaggcgcctgccaccacgcctggctaattttttgtatttttagtagagacaggttttcaccatattggtcaggctggtctcgaactcctgacctcaggtgatccgcccaccttggcctcccaaagtgctgggattacaggcgtgagccaccggcatggaatctgcaaatttgactctaactgtgagctggggttcccggggaaatgtttattgaatgattaagtgaaaggtggacaagtaggcggaatgaatggatgaggggcggaagggacattttggttgttatctgtcgctggaagtcctgagtgtagggtagagaagggcctgaggatgccataacacccttggccctccccctcatcttccagactcagctcaggggaccagtgagacgcccccgccaaagttgacccagccctcaccagcttgttttcgatgaggtcacagacgaccttgttgttgaagtactggattggagtccagcggatgccttcctgcacatactcctcctggggtggaaaagggggtggatgtgggggccagtgaaaaagttgtggccacccttccccccatgtcctctccccttctccatctcatcacttaggactgtctctggtaacaaagcccgtcactcctatgtgggcaaggctggaagtgccagggaattacatctggtttcagcagtccttgaccaataatcaacaggagtgggtggataaataccccagctccctcgcttctccgctctatgaagcctcctcgagtcccagtgcagttgcattccggttgtccacagcataacgtgctcattaacacactattttgactctttttttttttttttttttttttttgagatggagtttcactcctgttgcctaggctggagtgcaatggcacgatcttggctcatcgcaacctccgcctcccgagttcaagcgattctcctgcctcagcctcccgagaagctgggattacaggtatgtgccaccacgccggactaattttgtatttttagtagagatggggtttctccatgttggtcaggctggtctcgaactcccaacctcaggacatctgcccacctcggcctcccaaagtgctgggattacaggcatgagccaccgcacacagcttgctttttttttttgagaccgggttttgctctgttacccaggctggaactcagcgatgcgatcctagctcactgcaaccttgacctccagggttcaagtgatcctctcatctcagccttccgagtagctgggaccgtaggagcacaccaccatgcctggctaatttttatgttttttgtagagatgaggtctcactatgttgtccaggctggctttgaacccccaggctcaagcgatcctcttaacttagcctcctagatagctgggactataggtgtgagtgattgtgtctggctcggtctgtctctctctttttttcttttcttttttgagacagggtctcattctgctgttgcccaggctggagtgcaatggcacaatctcgactcactacaagctctgcctcctgggttcaagcaattctcctgcctcagactcctgagtagctgggattacaggtgcccagcaccacacctggctaagttttatatttttagtagagatggggtttcaccatgttggccaggctggtctcaaactcctgacctcaggtgatccacccacctcagcctcccaaagtgctgggattacaggcgtgagccactgcacccagcctctctctctctctttgttaaaaaaatccctgtctcaggactgggcatattaactcatgcctgtagtcccagcactttggcaggccaaggcaggaggattgcttgaggccaggagttcaagaccaatctgggcaacaaagtgaaacaccaactctacaaaaaagttttaaaatattagccaggcatgatggtgtgtgcctgcggtcccagctacttgagaggctgaagtgggaggattgcttgagcccaggaggtgtagactgcagtgacctgtgatcacaccactgcactccagcctggacaacagagcgagttcctgtctcaaaaaaaaaaaaaaaaaaaaaaaagcggggaatggtggctcccatctgtaatcccagcactttgggaggctgaggtgggtggatcacgaggtcaggagtttgagaccagtctggccaatatgatgaaaccctgtctctactaaaaatacaaaaattagctgggcatggtggtgggtgcctgtagtcccagctgctcgggaggctgaggcaggagaatcacttgaactctggaggcggaggttgcagtgagccgagatcatgccactgcactccagcctgggtgacagaacgagactttgtctcaaaaaaaaaaaaaaaaatccctgacttacttcctcagtctcctcttggagcttcctgggattgcctcccagaaaaaccatttgtctctgaatccttgcctcaggctctgcttctgggggaggggcaaaatgaagacagcagggactattgccttattgttcatggctgtgtctccaagcaccctaaacagtacctggcacacaacaggtgctcaataaataattgctgaatgaatgaactaagaggcacggtccttcccaaagctttagaggcagaaggaagtatcactatggagcctgggtaggttggcacagagaggtgggaacgcggtggggagggctggggtgtcccctagttgctaagggatcctcatggtccttccaccccacccccaccccaggatcccccatccctgactgcttggccgcccacctgctcggccttcagggtaagttcgataaagatttgctgcagcttctcattgacgaagttgatgcaaaactgctcgaagccatttttctgcagaaggaggaaaagggtccttccctcaatgtcctggtgctggaagttcttgtggccaccctgggctgccccagggaggacaggatgtgggctggaggcagggggccgtacctggaagatctcgaagccgtaaatgtccagcacaccgatgctgtactcttcctggggtttctgcatagcacggttgatggcctgcggtgtgggtggggacaggaagtcagtgggcatcggtcagatctgaagcccctgcccaccactccttagacacacgcctagccaacttcatgggtgatgtcccctcatgccagtttccctccagccctctttagctctgcccttcctggctctgtgtacagtctccccaccccataatcagtcactcagaggagaaacccaagtgtcagtgtatcagggtccctgactccagagctgactctgcccctgaacctctctgcacctctattttctttttttttttttcttttttttttttgagacggagtctcactctgtcgcccaggctggagtgcagtggcatgatctcggctcactgcaagctccgcctccagggttcacaccattctcctgcctcagcctcccaagtagctggaactacaagggcctgccaccacgcccggctaattttttgtatttttagtagagacggggtttcactgtggtctcgatctcctgacctcgtgatccgcccgcctcggcctcccaaagtgccgggattacaggtgtgagccactgcgcccggccttgcacctctattttcttatctttaaaaggggttgataatagcaactaccttatggggctttttcttttctattttttttgagatggagtctcattctgttgcccaggctggaatgccagtggcgcaatctcggctcactgaaacctctgcctccaggattcaagagattcttctgcctcagcctcccaagtagctgggattacaggcatgcgccaccacgcccggctaattcttgtatttttagtagagacggggttttgccatgctggccagggctgatcttgaactcctgaccttgggtgatctgcccgctttgacctcccaaagtgctgggattacaggcatgagccactgcacctggccatacattttatactttatttatttttattttttattttgagacagggtctcagtctgttgtccaggctggagtgtagtggcttgatcatggctcactacagcctcaacctcctggggtcagggattcttccacctcagcctcctgagtagccgggattacaggcaccagccaccatgcccggctaatttttgtatttttgtagagacagggttttgccatgttgcccaggctgactccatacattaaaaaagtttttattttatttatttatttattttgagacagagtctctctctgttgcccaggctggaatacaatagcacgatctcagctcactgcaacctccacctcccaggttcaagtgattctcctccctcagcctcccaagtagctgggattaaaggcatgtgccaccactcccgggtaatttttagtagagagggggtttcaccatgttggccaggctggtctcaaactccagacctcaagtgatccatccacctcagcctcccaaagtgctgggattacaggcatgagccactgcatctggccaaaagttttttttagagacagggtcttgctctgtcacccaggctggagtacaatagcgcaatcatagctcactgcagccccaacctcctgggttcaaatgatcccccaacctcagccctctgagtagccagaactacacatgcacaccactacacccaactaatttgaaatttctgtagagatgggggtcttgctatgttgcccaggctggtcttgaacttctggcctcaaagaatgctcccaactcagccacccaaagcattgggattgcagccgtgagccactgcactcagcttccataaatgtttgtgaccccagagcatccactctgccttccagccccagccccactcgcctccacgaggaagtcgaagaggcgggcatagagccccttggccagggcatcacgggtgtaggctgcctgctccacgttgagggtcacattgatggactcgctgcgcccgccccagcggctgtccatcttgcggctggtcagcttctcctgcagtcgcccgctgtcaatgcccagcaggtaggcgggaaaggccaggactaccagggcaaaggtcagggcaaaaatgggacagttggttgggctcttgtgcctcctgcatgggcctcctattatccccatcttgcccagtgacacccacatttttttcctcgtgggctttcagcttcctgggggctgagctaggaggacgcagttcacccacccacaggcctccatccagccctccctgatacccacactcacggtccacactctccactcgggcgtaattcccgtcttcacagaaactgatgttccccaggtgcaagatccccgccacgagctgcaggaccagctgctggatgctgggcgggatcccaataacctgcatagcactctgtggtacaacgggggcagaaactgtgccgtgaatcctggcctccaacctgcctccaggggcaggcttgagggaccacagcacggactcagggagtgagcacccttgggtccctgtcctacccctttcagtcacttgccgcgtgaccttgggtaagtgcctgcacctctctgggctttgttttttattatattttttatttttgagacagagtctccctctgttgcccaggctggagtgcagtggtatgatcttggctcactgcaacctcctcatcccaggttcaagcgattttcctgcctccgcctcccgagtagctgggattacaggcgtgagcgtcgtgtccggactgggctttggtttcctatttttttttttttagagtctcactctttcacccaggcgggagtgcagcggcgctatcttggctcactgcaacctccacctcccgggtttaagcgattctcctgcctcagcctccctagtagctgggactacaggcgcatggcatcatacccggctaatctttgtattcttaataaagatggggtttcactatgttggccaggctggtcttgaactcctgacctcaggtgatctacctgcctcggcctcccaaagtgctgggattacaggtgtgagccaccgtgcctggccttttttttttttttttttgagatgtagtctcactctgttgcccaggctggagtgcagtagtgtgatctcggctcactgcaacttccacctcccgttttcaagcaattttcctgcctctgcctccccagtagctgggattacagtcacacgccaccacatctggctaatttttgtattttaagtagagacggggtttaaccacgttggccaggccggtcttaaactcctgaccttaagtgatctacctgcctcggcctcccaaagtgctgggattacaggcttgagccacatgcctggcctgggcttcggtttcctaatttgtaactcaggagggtttctggggctgaggtctgcctggccggggactggagtagaggccggtgctcaccagagtctcaccaaagtcgcttctgtcgtccgtgccgtccacctggtaggtgtccgattggttgaggtagtaatagtagtccggtgtcatgaggcccaggttctgcctttgctcctgggaggccccttccagcagctggagggtgtgccatgttcatgcatctggtgcttgcctggctcagcccctgtgatccctcatctgccctgccatgcccccctaggtgtttaccttcccattgtccaccccgctgggctccaggtggtgctccctctcccccggccccttccctgcacctggtagtagatgtggaagttcctctcattttcattttgcatgaccacgcgggacttctccagcaagaagttggagatcttgcccccatctggctccccacctcggctgaactggatctcaaagtacttgccctgaatccgagagaaccatgtcagcaccccagtgtcctggggtgcaggtgggggaagggttggggatgggtcttatgagccttgcctctcttcccttcttccttttttttttgagacagaatctgactctgttgctcaggctgggattcagtggcgcaatgtcggctcactgcaacgtccacctcctgggttcaagtgattctcctgccttagcctcctgagtagctgggactacaggcacccgccaccatgcccagctaatttttgtatttttggcagagctaatttttgtatttttcatcatgttggccaggctggtcttgaactccagacctcaagtgatccgcctgtctcagcctcccaaagtgctgggatttcagatgtgagcccccacacccagcccaagggtatggaatttattaaaccatgtccatgtgcaggtgtaatactgaagtctatgagatggatattaacatcgtcaccattttatggatgagcaaacagaggaaactcaggaagttgcatagatttttttcccccccaggctacacagctcacagtgatagaatcaaaccctgaatccatatctgtttacctatcctgactttcactgggcccagcgcagcacccacacaaagaacgagtcccagaactattgtcgaaagaaggaatggatgagggaataaattggacctgaaatgtgaatgggaacaatgtagcatggctgcagccgggggagcatttaagaatgttacacaggggtgtcatggcctccacagttctgccaatgggggactctcttttgaaagggaccatgagcaggaagtgagtctccccttcaggagtaggtatttcctgctgggttttcaatggactcttgtcttggcaatacgggtgtgtgtatgtgtgggtgtgtgtgtagaaaggtcagcacggagggagcagctgctccaagcaggtctgcagagacttacaaagcggctggaattgttgttgcgcacagtcttggcgttgccgaaggcctcgagcagcgggttggactgcaggatgatatctttgacgtgctggggcagaggcaggtggagtgggaagaagtcagactgaggcaggagtgcagatgggtggggctgcactaccatgcaggtgagggcgacccagcttatccttctgttttcctcgtctcacctggaccttctcgcctccgccagacaccttggagatgtagcccatgatatatttggctgccactgtcttcccagctccactctctccactggggatgaatggaggaataaatgatcagtggttggggaagagccctttttagtgcctgaccattcattcattgagcacctactgtgtgcctgccagtattccgggtactggggatactgtaatgaacaagacagataaaatctctgctctcagccgggcatggtggctcctgcctgtaatcccagcactttgggagcctgaggagggcggatcacttgaggtcaaaagttagagaccagcctggccaacatggtgaaacccagtctctactaaaatacaaaaattagccggacatggtggtgggcgcctgtaatcccggccactcaggaggctgaggcaggagaattgcttgaacctgggaggcagaggttgcagtgagctgaggttgtgccactgcactccagcctgggtgacagactgagactctgtcacacacacacacacacacacacacactctctctctctctctctctctctctctcgctctctttctctctctctgctctcatagagctggcatcgattgattgactgagatggggtctcactctgttgcccaggctggagtgcagtggtgtgatcatagcacctgttcctgcctggaactcctgggctcaagcaatcctccctcctcagcctcttgagtagctggggactacaggcgtgcaccaccgtgtccggctaattattatctatacagagacaggatgttgccatattgcccaggctggtcttgaactcctagcctcaagagatcctctcgccttggcctcccaaagtgccaggattacaagcatgagccactacacctggcctgaggtgacatttagaggggacagacagacaatagcagaatgaatcaataaaatacatcgtgagtcagatggtgacaaggaaaataaaacagagtgagggcagagagggacagcagggcaatgttcagattgggagtttcaggcaaacctccctgggggtggtgatgtttcagcaggggcccgggcagcagggtctgtggccccccaactctgtccatacctaatgatgacacactggttctcacagtcgataagcatgttccggtacatgttgtccgtgagggcgtagatgtgcgggggattctcatactgggcctggcaggggaggtcaggtctcagcccagggctgggggccaggagtctgggggctgtgcctcccacccagccccagcctcaccgcgccctgatagaggtcgatctcacggtcggtgaagtagggcatctgcttgaaggggtttacagagatgagcacagagccgatgtaggtctgagggatggttaagggtcgtgtggtgtcctggtaggttttgtcctccctgtcccctcatcctgcccccacccagggcttcctaaaactccattgcttggaggtggaagagatggagataatggatgcacctcgagtctcttggaaaaaacagggctggccgggcgcggtggctcatgcctgtaatcccagcactttggaaggccgaggcaggcggatcacttgaggtcaggagtttgagaccagcctggccaacatggtgaaaccttgtctccactaataatacaaaaaattacccgggcatggtggtgcatgcctgtaatcccggctacttgggaggctgagggaggagaatcgcttgaacctgggaggcagaggttgcagcgagctatcgtgccattgcactccagcctgggcaacaagagccactcagtctcaaaaacaaaacacaaaacacaaaaagcaaaaacaaaaaaattagccaggcatggtggcgcatgcctataatcccagctacttgggaggctgaggcaggagaatcatttgaatccgggaggtggaggttgcagtgagctgagattgtgccactacactccagcctggaacctgggcgacagagcaagactccgtctcaaaaaaaaaaaaaaaaaaaaaaaaaaaaaagaacaaacagggttggatccggaatgggggaaatggaacacgctggggctgagcttccccaggacagagggagcagtggcagccacagctgcccccaaccagagccctgctgtcactctgtctgtcctctgtgtcaccacttggtgctctcccggcccattcctccctctgctccttcaccctcctctccgtccatggcccagccattcattccttccctgcctgcccacccccagccttggcccagggtacgaagatgtagtcgtccatgaagcgcttccggaggttggcggcaatggcgtcttcggtgatctggggaagaagcaccatgtcatccacgccgctctgcttcacgttgtggctctgccagtggaagcgctccttgctgccctggggggtgagaggggggtcggggtgagcccttgcacggggatgcggcacctggctcaccgacgctatcagcttctgggttctgtcccacctcccccgccccacctccattcctccttccccatctccaggagaggctggcagggtccaagccaggccccctgccccagacagaagttgcactgctcggatccagccctcagccctctatttttttttaatttttaatttttatttatttatttattttgagacagagtctcactctgtcagtcaggctggggtgcagtggcgtgatctctgctcactgcaacatccacctcccgggttcaagcgattctcctgcctcagcctcccgagtagctgggattacaggtgcccaccaccatgcccggctaatttttaatatttttggtagagatggggtttcaccatgttggccaggctggtctggaactcctgacttcaagtgatccacccgcctcaggctcccaaagtgctgggattacaggcgtgagccaccgcacccggcctcttttttttttaattaaaaaattttttaatgccaagtgcagtggctcatgcccgtaatcccagcacttcgggaggttgaggcaggaggatcgcttgaggccaggagttcgagaccagcctgggcaacatagcgaggccccgtctctataaaaaaagaaagaaagaaagaaagaaagagaaagaaagagaaagaaagaaagaaatgagatctcaagccatgaaaagacatggaggaaacttaaaggcatatcactaagtgaaagaagccaatctggggccgggcacagtggctcatgcctgtaatcccagcactttgggaggccaagacgggtggatcacctgaggacgagagttcgagaccagtctgatcaatatggagaaaccccgtctatactaaaaatacaaaattagccaggtgtgctggcacatgcctgttatcccagctactcgggaggctgaggcaggagaatcgcttgaacctgggagacagaggttgcagtgagccgagattgtgccattgcactccagccttggcaacaagagtgaaactctgtctcaaaaaaaaaaaaaaaaaaaaaaaggaagccaatctgaaaaggctatttactgtcttattccaactataggatattctggaaaaggcaaaactatgaggacagtaaaagatcagtggggccagacgcaatggctcacacctgtaatcccagcactttgggaggccgaggcgggaggactgcttaaggccagcagttcaagaccagcctgggcaacatagtgagacccccatctctacaaaaaatagaaaaattagacgagtggtggcatgtgtctgtgatcatagctactctggaagctgaggtgggaggatcacttgagcccaggatgtggaggttgcagtgagctgatatttcgccactacactccatcctggatgactctgtctcaaaaaaaacaaacaaccaaacaaacaacaaaaaaagttttgagacagggtctcactctgtcacccaggctggagtgcagtggtgtgatcacagctccatgcagcctcaacctcctgggctcaagcaatccttccaccacaccacagcctcctgggtagctgggactacagacgtgcaccaccatgcctggataatttttgtatttttttgtagagatggggtcttgctatgttgccctggctggtcttgaactcctgggctgaatggattatctgtctcagtcccccaaagtggtgggattataggcgtaagctactgcacccagcccctcagccctctcctttggtctctctttccatctgtcactccacctagtacccctcacttcccatgaaggatgccaggcttggcgggcagggcacagagtgcttggggttctgcaggctgtaggagcagagcagggagaccgggtgacttggtgggaagtgggcgcatcccagttctcacttcctgccagcctcccagcctctccctttcacatcccccgtcccctccccaggcccaggccagtccctgacttctctgtggcatttgatccactgctgccaggccccttccttctccctcctacctctcctcttctcttgtggtcacacataccagctggtccctttgagctcctccaggccaccatgtgctgtgacctctgccctctgtgcctgtgtatgactttgttcctcagctctaccctctactcccagccctgcctccctgctgcccctgccgtggccttctcctctgtgtcccttcaccttgcccctcagcagtgccagcaccttcttaggttgccatttttttcatttcatttcctctctcagtttttctttttcttttctttttttcttttgagtcagagtcttgttctgtcacccaggctggagtgcagtggcgggatcatagctcactgtagccctgaccttctgggctcaagagatcctcccacctcagcctcctgagtagctgggaccacaggtgtgtgccaccatgcccagctaatatttaaattttttttgtattgatggggtcttgctctgttgctcaggctggtctttaacttctggcctcaagtgatcctcccacctcagcctcccaaagtgctggaatttcaggcatgagacaccttgcctgacccagacgacactttctttaggccccatggaggagactgaggcacatgctctccaaaatctcctcttccaggaagcctgccctggttgctctccttttagcccgactgaatttatctagtgccttaaacaccctggctttctcaggctcactctgtctctattcaacacatctctgcaaaggagtagtctgacagataggagtgatggcaacttggagctaccccatttggtgaactgatggtcagataagatgtctctcctcctggaagccccccatccccaggccaggagctcctggagacagagactggggctgagtcttttctctgtcaaatgaacaggggacaaaggtaaagaaagaaacccagattcagagcaaaaaccaccagagcaaacaaagctgggaattgaagtatttttgtatttttgagatggggtctcactgctttgcccaggctggatggagtgcagtggtgagaccacggctcactgctacctctgcctgcggggctcaagcgagcctgtcacctcggcctcctgagtagctggcactacaggcacacaccactaagcccagctaattttttgtatttttggtagagacggggtttcactgtgttgctcaggctggtcttgaactcctgagttcaagcgaccttcctgcctcgatcttccaaactgctgggattacaggcatgagccaccgctcccagcccaggattgaagtctttaaagtggactgtgtttgccagtggattccagggatacaggcagggcacaagcagaagtgtccacgtgggcaactgtaaggcagaagtggagccagtctctcctgggggtactggggagccacggaatgttcttgagggggtggggggtggggggtgggggtggaggtgcatgatcagattctggacatactgacagttagaggttgttgagggatgcccatgggcattaaataagcccagcctttggcataagggtagatctgggttctgatcctgactgggcaaacagatgctgctgtgagtctccatcgtctcatctataaaaaggaagaggcagctccacttcccagggttgatgagaggatgaactactctgggggaacaaggtgggatgggaggctggtgcccctccccaagcctgagtggtcgtgaggatagaccgaggctgaggggcatttgaaagaattaacacgaccgggcgcggtggctcacacctgcaatcccagcactttgggaggccgaggcggggagatcatctaaggtcgggagtttgagaccagcctgaccaacatggtgaaactccatctctactaaaaatacaaaaattagctgggcgtggtggcgcacgcctgtaatcccagctactcgggaggctgaggcaggagaatcgctagaacccaggaggcggaggttgcggtgagcccagattgtgccattgcactccagcctgggcaacaagagcaaaactccatctcagaaaaaaaaaaaaaaaaaaagtaaagaattaacactcagcgagcacctatgctgtgcctggtttgggggatgtagatggttgatactggcagccatcatcacaccatctcagtgtgggtaggctcgaagggaaacggaggctggagaagtacagcagcttccttaaggacacgggactaaagatacaggtattgtttccaagggtgtggggtttgaacctgggtctattcaacagcaaagaacaggttcttggctgggcgcggtggctcacgcctgtaatcccagcactttgggaggctgaggcgggcggatcatgaggtcaggagatcgagaccatcctggctaacatggtgaaaccccatctctactaaaaatacaaaaaaagtagccgggtgtgggggtgcgcgcctgtaatcccagctactcaggaggctgaggcaggagactcgcttgatcccgggaggcagaggttgcagtgagccgagattgcaccattgcactccaacctgggcaaacatagcgagacttggtcttaaaaaaaggaaaaaaaaaaaagaacaggttcttgcctctgtctacacgcacaggaggctgggctggtgctgagaaggatttttttgttttgttttggtttggtttttgagacagggtctcactctgtctcccaggctggagtgcagtggcaaggtcatggctcactgcagccttgacctcctgggctcaagtgatcctcctggtctcagcctcctgtgtagctgagactacaggcacatgccaccacgcctggctaattttttttttttttgagacagagtcttgctctgtcgcccaggctggagcgcagtggcacgatctcggctcactgcaagctctgtctcctgtgttcacgccattctcctgcctcagcctcccgagtagctgggactacaggcgcccgccaccacggcggctaattttttgtatttttggtagagacggggtttcactgtattagccaggatggtctcaatctcctgaccttgtgatctgcccgcctcggcctcccaaagtgctgggattataggtgtgagccactgcgcctggccacgcctggctaatttttaaatatttcatagagacatggtcttgctctgttgctcaggctgatgtctataactcctgggctcaagtgatcctcccaccttggccttccaaaatgctgggattacaggtgtgagccactgtgcctggcctgagaagggttttgataaacagctgggagaaagggtgcaccagtcagggttaactgtctggggaaaggtgtggaggtgtggctgcagcagggacagagaatggaatgcaggggtagtcagggcttcaacccctcacactgctcctggcctgagtagtcagcatgaattccctccctccctccctccctccctcccttccccccttctttccttccttcctttctcctctccctcccttcctttctcctctccctcccttccttcctccctctctccctctctctctctttctttttctctttctttcgttctctttcttctctctcattcttctctctttctctcttctttcttcctctttctttccctccctcccctcctctccctccttccttccttccctccctccctctcttctcttttttctttctctctttctttcttctttctttccttctttccttccattttttctttccttctttcctttcttcccttcccttttccttccttccttcctcctttttttctatctttttttttgtttgtttgagatggagtctcgctctgttggccaggctggagtgtagtggcgcgatcttggctcactgcaaaatctacctcccaggttcaaacgattcttctgcctcagcctcccgggcagctgggactataggcgcgcaccaccacacccggctaatttttgtatttttagtagagataaggtttcaccatattggccaggctggtcttgaactcctgacctcgtgatccacccatgtcggcctcccaaagtgctgggattacaggcatgagccactgcgtctggcccttccttcctttttctttttttttcttttgttttttttgagatggagtcttgctctgtcgcccaggctgaagggcagtggcacaatctcggctcactgcaagcctcgcctccagggttcacgccgttctcctgcccggctaattttttctttttttttttgtatttttagtggagacgaggtttcaccgtgttagccaggatggtcttgatctcctgacctcgttacccgcccgccttggcctcacaaagcactgggattataggcatgagccaccgcaccggcccttcctttctttttcttgtcttttttgagacaagatctcactctgtcacctaggctggagtgcactggtgcgatcatacctcactgcggcctcgaactcctgggcccaagcaatcctcctgccttgacctcctgagtagctgggcctatgggtggaagccactgggcccagctgggagattttagttttgttcagtgtgctaagagctcaacactttgtttattttaaaaatttatttacttatttatttttttgaggcagggtcttgctctgttgcccaggctggagtgcagtggtgtaatcatagctaactgtagccttgacgtccaggctcaagtgatcctcccaccccagcctcctgagtagctgggaccacaggcaagtaccactgtgcccagctacttaaattttttttttacagatggggtctccctatgttgcccaggctggtctctaactcctgggctcaagcaatcctcctgcctcagtctcccagagtgccaggattacaggcatgagccatggtgcctggccaagttaaacattttggaaactcacttcgttgaaagtcatgccggtggtggcgttaaaaatgacctgtaggtgggactgtcatacttgtttacaggtgggagcacctggtggctctcctgggccttcttggaccgctgaccttagcaccttctttccttctttcctttttttgttttgataccgagtctcactctgtcgcccaggctggagtgcagtggtttgatcgcagctcactgtaacctctgcctcccgggtccaagtgattgtcctgtctcagcctcccgagtagctgggactacaggcacctgccaccatgcctggctaattttttgtatttttagtatggatggggtttcaccatgttggtcaggctggtcttgaactcctgacctcaggtgatccacccgcctcggcctcccaaaatgctgggattataggcatgagccactgtgcttggccactttttttttttttttttttttgagacacagtcttgctctatcgcccaggctggagtgcagtggtgagatctcagctcactgcaacctctgcttcccggattcaagcgattctcatgcctcagcctcctgagtacctgggattataggcgtgcaccaccacgcccagctaacgttttgtaattttagtagagacaggatttttctttttctttctttctttcttttttttttgagatggagtgtctctcttgttatctgggctggagtgcaatgatgtgatctcagctcactgcaaccttcgcctcccgggttcaagcgattttcctgcctcagcctccctagtagctggggttacaggagcccatcaacacgcccagctaattttttttgtatttttagtagagatgggctttcactatgttggtcaggctggtctggaactcctgacctcaggcgatccccctgcctcagcctcccaaagtgctgggattacaggggtgagccaccgcgcctggcttgagacagggtttttctatgttggccaggctggtctcaaactcctagcctcaggtgatccacccgccttggcttctcaaagtgctgagattataggcatgagccactgcgctttggcctgaccctagcactctcatatttggacacacattttattgtaaggtcttcattacaggcaatcacattgattctttttgaaactatgggagttgagtgtgtccattgtctgaggttaatgtcgggatttaaaggaggcctaattaggtgtttttataagaagtgggtgctggccgggcatggcggctcatgcctataatcccagcactttgggaggccaaggtggatggatcacttgaggtcaggagttcgagaccagcctggccaacatggtgaaaccccgtctctactaaaaatacaaaaattagccaggcgtggtgtcaggcgcctgtaatcccagctacttgggaggctgaggcaggagaatcgcttgaacccaggaggcagaggttgcagtgagccaagatcatgccattgcacttcagcctgggcgacaggagtgaaaccctgtcttgaaaacaacaaaaaaagaaggaggtgctgactgggatgcactgagagtccctggggtgcgtcaggagatgacagaatcctggggagcagtggcatggaggggttgaagttgacacccaccacagactggctgagtaggaactgccagggaagtcagaggcaaaacccggaccaggcaggggaggcccagatgggacgagggtgggttaggagccatcgactcaaccctgaagagcgtctgagctcactggagactaagaggggccccagggtcagaagcaggattgggaggctaggaggtatagacaggaatgaggatctggctgagaaggggaagagggagagaggctgtgggggagaagtggggtcaggggagcccgtgtttcctgttttttttttgttgttgttttgagacagagtctcgctctgtcacccaggctggagtgcagtggtatgatttcggctcactgcaacctccgcctcccgggttcaagtgattctcctgcctcagcctcccaagtaactggaattacaggcgcctgccaccaagccaggctgatttttgtgtttttagtagagacaggatttcaccacgttggacacgctcatctcgaactcccaacctcaggtgatccgcccacctcagcctcccactgtgctgggattacaggcatgagccactgtgtccggccagagacagggatttcaccatgttggccaggctggtctgtaactcctgacctcaagttcaagtgatccacccacctcagcctcccaaagtgctgggagtacaggcgtgagccaccacgcctggctcatttcattttcaagatggggagaccagatggttgatgagaagagacaataaaaattgtgggcaggttgggtgcagtagctcacgcctgtaatcccagcactttgggaggttgactcgggcagatcaactgaggttgggagtttgagaccagcctgaccaacgtggggaaaccccgtctccactaaaagtacaacattagccaggtgtggtggcgagcgcctgtaatcccagctactcgggaggctgaggcaggagaatagcttgaacctgggaggcagaggttgtagtgagccaagattgtgccattgcaagctagcctgggcaacaagtgcgaaactctgtctcgaaataataataataataaaaattaaaaaataaataattgtgggcaaagtggcatcattcatgggcctagtggggcaggagcagggtcgtgagtggtgagggtctgttctttttctaaacaggtatttggggagaggctggggacaggcacagctgtgtcagtgggtggggacacgggaagtgcattttgtctctgaagagcttaagggtggagattggatggaaataacaacaatagaaaacaatgacaacaacagttaacacctggccgggtggtggctcacacctgtcatcccagcactttgggaggctgaggtggaaggatcacttgaggccaggtgtttgagaccagcctgggcaacatagtgagacccccatctctgcaaaaaaaaataaaaaataaaaaataaataaaaattagccaggcatggtggtatgcgcctgtagtcccagccactcaggaggctgaggcaagaggatcacttgagcccaggagttcggagttacagtgagctgtgattgtggcagcactccagcctggatgacagacgaagacccagaaaaaaaacccaaacaccaaactagcacttattctgtgtaccaggctccagtctatgtcttttttttttttttttttttttttgagatggagtcttgctttctcgcccaggctggagtgcagtggcatgatctcggctcactgcaagctctgcctcccgggttcacgccattctcctgcctcagcctcccatgtagctgggactacaggctcccacggccatgcccagctaattttttgtatttttagtagagatgggctttcaccgtgttagccaggatggtctcgagctcctgatctcatgatccacccgcctcggcctcccaaagtgctgggattacaggcgtgagccaccgcgcccggcctggtctatgctttttaaaaaaaattttatttttatttatttaatttaattaatttatttatttttgaaacagagtgttgctctttcgccctggctggagtgcagtggcatgatcttggctcactgcaacctctgcctccctggctcaagcgattctcctgcctcagtttcccaagtagctgggattacaggtgcatgccaccatgcccaggtaatatttgtattttttgtagagatggggtttcaccatgttggccaagctggtttcgaactcctgacctcaagtgatccacccgcctcagcctcccaaagtgctgggattacaagcatgagccaccataactggcctttatttattttaatatatatattaaataatatatgtttacaaacagagatagagtctcgctatgttgcctaggctggtcttgaactcctgaatttcaagtaatcctcttgcttcagcctatgaaagtgctaggattacaggcgtaagccaccaggccaagcctggtctaagctttttatgtgaattacttcatcttatcctttcaacacacgctggctgaggttagtcctatcactgggtccaatttttttttttttttttttttgagattgagtcttgctctgtcgcccaggctggaatgcagtggtacgactttggcttactgcaacctccgtctcccaggttcaagcaattccaattctctgcctcatcctctcgagtagctgggattataggcacccaccaccaagcctgctaatttttgtatttttagtagagatgggggtttcaccatcttggccaggctggtcttgaactcctgaccttgtgatccacctgcctcggcctcccaaagtgctgaaattacaggcatgagccaccgtgcccggcccactgggtctatttttttttgagacaaagtcttgctctgttgcacccaggctggagtgcagtggcacgatctcagctcactgcaacctccacctcctgggttcaagcgattctcctgcctcagcctcttgagtagctgggattacaggcgcctggctgatttttgtatttttagtagagacaaggttttaccgcgttgggcacgctcatctcgaactcccaacctcaggtgatcctcccacctcggcctcgcaaagtgctgggattataggcgtgagccaccgcacccatcctgggtccattttatagaagagaaaactacagcacagagaggttaagtgtcctcttcaaggacacacagcagtgcagagaggaccttggggaggacccacgaagctgtccttccccaggctggtctgtatcagagatcgccggggttgctgctgaggtcagatgaggatgggttggggagaagatgggtcatgtctacaatttcccctttgggggccagtgcaggcttcagcctgccaggccactcaggctgaactaagaccccaggccacttcccctcactggggtcagctgtgtctggctaggcccatcagccctcctggctctcccggctctgacgacttggttcctcttcctgcccttcccctctttcctcatctggcagagtggccctcttctctgaccattctctccctctctatcctgccccaggcactagaggccctcagacactccatgctccagccacctgtaaaatcacaggctgggccgggcacggtggctcacacctgtgatcccagcactttgggaggccgaggtgggtggatcacgaggtcaggagatcgagactatcctggctaacacggtgaaaccccgtctctactaaaactacaaaaaattagccaggtgcggtggcgggcgcccgtagtcccagctcctcgggaggctgaggcaggagaatggcgtgaacctgggaggcggagcttgcagtgagctgagatggtgccactgcagtccggcctgggtgaaagagtgagactccgtctcaaaaaaaaaaaaaaaaaaaaaaattaatcacaggctgtttgcatcgaagggagagagggttttgctcaagtgaatatcgtgtggggaggatagtcgagaattttggcatgtgatggattggggtcaaagcctggcttgacagttgactgactgtgtgactctggggaggtcacttctcttctccaagcctcagtttctcctctttgcaagtggatttggccgcgcatggtggctcacgcctgtaatcccagcacttttggaggcgaggcaggcagatcacttgaggtcaggagttcaagaccagcctggccaacatggtgaaacctcatctctactaaaaatacaaaaattagcccggcgtggtggcgggtgtctgtagtcttagctatccgggaggctgaggcaggggaattgcttgaacctaggaggtggaggttgcagtgagccaagattacgtcattgcactccagcctgggcaacagagcgagactccatctcaacaacaacaaataaccaaatggattccataatgacccttgtgtggggtctctgaaacaagtacaggagcgaacaaagagaaaaaatgcgccgagatgcctcaggaaatgtcatctgtgaccttgagaggatttaaggcatcagtgttggacagaaagcctggtcaatacatacttgttgaatgaatgaatgaatgaatgaagtcctattgggatgagactgccccctgccctgtctcccagatatctctctcattctgtggcctccaagtctccatgggtcaagtcaaaactgtttgtttgtaagtctcttccttgggggtggggatgcaacgaagagcttgtggtcacagttgaccacaagctgaatatgactcaacctgctggagctcttgtgaaaggcagtcaggggcttgaggtgggtggggtaggaaggacgggtagcttcttccttcagctcttcagagaggtctctctaccccaaggctgaaggcagaactagggcaggcggggacaaccttcctggtatcacaccagggaggggctgtttgtggtgaaggtgatggtgcctatggggctgggggatgtgtgccatggagggaacacacttcctgggcccctactgtgcatggaggtaggtggagaccaggcttaggtggaccaggcccagaacctgcccttggggggctcggtgttccccaagtggtgtctcagttgcccagaggagaccatggctggaaagtactgtggagaggtgagagggcttcctgtagaaggcacgtcttgcaacatgaactttccaggcagcatcagtggtggctgcaagagacatcagccagagaggccttgggtgtgtggtggacaccaggattctagtctgtttggaatggagggtcatggtcctggagggatagacagcccaggccatgtggggtcagcacatagtcctgctggcctctcattgcttaggaggacaggaggctgtggtcaaggtgcctgttattttttttggacagagtcttgttctgttgcccaggttggaaggcagtggtttgatatcactgcagccttgacctcccaggctcaagcgaatcctcctgcctcagcctcctgagtagctgggaccacaggtgcatactaccacgcctggctaatacatttttttttttttgagatggagtcttgctctgttgttcaggctggagtgcagcggcatgatctaggcttactgcaacctctgcctcccaggttcaagtgattctcctgcctcagcctcccaagtagctgggattacaggcgtgcacaacgcctggctaatttttgtatttttagtagagaccaggtttcatcatgttggccaggctggtctcgaactcctgacctcaggcaatccactcatctcggcctcccaaagtgctgggattataggcgtgagccactgcacccagccacatttttttttttatttgagatggagtctcgctcttgttgctcagtctgtgagtgcagtggcatgaccttggctcaacctctgcctcccaggttcaagcaattctcctgccttagcctcctgagtagctgggattacaggtgcacgccaccacacctggctaatttttgtgtttttagtagagacagggtttcaccacgttggccaggctggtcttgaactcctgaccccaagtgatctgcccgccttgacctcccaaagtgctggaatgacgggcactgggatgagccaccgcacccaaccacatttttttttttttaaatagagacaaagtctaactatgttgcttaggctggtctcaaactcctggactgctgatcctcttgccttggcctcccaaagcgctggaattacaggtgcaagccgctgtgcccggccaagatggctgttaatagtgtggccttgggagtcactgagtcaaaatcctctttcattttagattgggcagctcacctaacctctctgcctcagtttcctcattcggaaaatgggaacatcgaggggtgcaaatctcacaggctgctctgcagattcaacgaagcaaaggttgtccagtgtaaatgctagcgttcctcactgtccccatcaatggtggccatgagctggccaggaggaagggctggaggagggagcttttgcaactcaccccatgggctccaggctgtctgctttttctgggcgtgatgagcaagagctctagattgaagacagcaaacaaacagccacttccttcctcacccaggtcctgcgagctgtggttgccgggaggagagctaagcctccgtagctgcttctggagccagctctcagctcccagaccctgccctggtgcctgagggtggccctggagccttgcccccagctcagtggggctctggggccacaccctgcgtccatgcactgtgcaaacaacattctcacctccaaaggctccatccctcaggggagcagggggactggactctgtttcttttcttttctctctctctctcttttttttttttagatggaatctcactctgttgcccaggctggagtgcagtggcatgatctcggctcactgcaacctccacctcctgggttcaagcgattctcctgcctcagcctcccgagtagctgggactacaggcgcccgccaccgcgcccggctaattttttttttgtatttttgtatttttattgttttgagacggagtcttgctctctcacccaggctggagtgcagtggcgccatctcggctcactgcaagctctgcctcccgagttcacgccattcttctgcctcagcctcccaagtagctgggactacaggcacccgccaccacgcctgggtaattttttgtatttttagtagagacggggtttcaccatgttagccaggatggtctcgatctcctgacctcatgatctgcccgcctcggcctcccaaagtgctgggattataggtgtaagccaccgcgcccagcccctgtatttttagagacggggtttcactgtgttagccaggatggtctcgatctcctgacttcgtgatccgcacgcctcggcctcctaaagtattgggattacaggcgtaagccaccgcgcctggcctttatacgtggggacccttgtctttctggagctgggctctttgtctcgtcgctggagattgctgacagtcggtggctaccgtctcaaacatctccacgcagaagctggagctggggaaccctggtcttgtccctcctgctttttggggaagatcctctgggatgtggtccccaacccccaagacagaaacctgcctgtctctgattcattgttacgttcactctttgcatccaatcaattatgggcatttttttttcccctctgagacagagtctcgctctgttgcccaagctggagtgtagtggtgcgatctcagctcactgcaacctctgcctctcgggttcaagcgattctgctgcctcagcctcctgagtagctgggattacaggcacatgccaccccgcttggctaatttttgtatttttagtagagatggggtttcaccatggtggccagactggtctcgaacacctgacctcaagtgatccacctgcctcggcctcctaaagtgctgggattacaggtgtgagccactgtgcccgtgcccagttagtggtcttaactgattctttctcctaaattccttttgactcccagcctttcctgtccatcctcatggccactgattctggacccagcagccacttcactggtctccctgctttgtggctgtatcttatttatttgtttagaaacagagtctgtctctgttgctcaggctggagtgcagtggggccatcacagctcactgcagcctggaactcctgggctcaagtgatcttcccacctcagcttcccaattagctggtactacaggtccatgccaccatgcctggctaacttttaaatgctttgtagagatggggtattgccatgtctcccaggctggtctcgaacatctggcctcaagtgatcctcccacctccgtcttccaaactgttgggattacaggcatgagccattgttcctggccctgtgactgtaccttagaaacaatcactattggccaggtgtggtggctcacgcctataatcccagcactttgggaggctgaggcgggcagatcacgaggtcaggagatcgagaccatccttgctaacacggtgaaaccccatctctactaaaaaaatagaaaaaaattagccaggcatggtggcgggcgcctgtagtcccagctactcgggaggctgaggcaggagaatggcatgaacctaggaggtggggcttgcagtgagccaagatcatgccactgcactccatcctgggtgacagagcgagactctgtctcaaaaaaaaaagaagagacaatcactattatcctcacatgaccaccatcaccaaccaaaggcaaccagtgaacgtcttcactctctctcctacccttctcaaagacaaacagaaactgctgataactccaataccatcatgactagccaatgtcagacaggtcccatgagcaattccagcatcagccttccttacattctcccacgatcaccaccaccaccaccaccacgctataataaccaaccaccatctagtcatcggccaggcacagtggctcacacctgtaatctcacactttgggaggccaaagcgggtggatcacttgaggttaggagttggagaccagcctggccaacatggcgaaaccccgtctccactaaaagcacaaaaattagctgggtgtggtggcaggtgcttgtaatctcagctacttgggaggctgaggcacgagaattgcttgaagccaggaggtggaggttgcagtgagccgagattgcaccactgcactccagccggggtgacagagcgagactctgtctcagaaacaaaacaaaacaaaaaaacaatactagccatcaacaaccacacataaccaactaccattagcaaccacagaaagcagcagtcaccagtcctatcctgttcaaaacccaacattgaaccagcaccaccattgctgatcatcatcttaccagaaaccaacaataaactaccagcagcaaatgaacgctactaccaacacctttcctctccaaataacagcaaccaccgatggtcatcattccactggtcaccaagcatctccagaatttccagctgaaaacaatccaccaccaacgaacaacattaaacaccaaccgccaccaccaccagcccacctgcaagagccattatcaccacgaacctgcaacaagaaacagccacaaccaccaccacaaccaatgacaccaacaacccagcaatgaccactcgcagcaactcctccccaattaccacaatcgtcacctccgtccatcctcattgctgaatccagaaatgaatggacatcccagctaatggcagctaccatggatcaagtgcatgttatgtgctctgtaaagcaatggtccccaacatttttggcaccagagaccggtttaatggaagacaatttttccatggaccatggagcggggcattagattttcttttctttcttttcctttatttcttcttttttccctttctttctttctttctttctttctttctttctttctttctttctttctctctctctctctctctctttctttctttctttctttctttctttctttctttctttctttctttcctttctttctctttcttctttctctctttctttctttcttcctttctctttctctctttctttctttttctttctctttctttctttctttttctttctttctttctctctctctttcttttttttttgagatggagcctctctctgtggcccaggctggagtgcagtggcgtgatctcgtctcattgcgacctctgcctcctgggttcaagtgattctcctatctcaggttcccgggtagctggggttacaggcgcgcaccaccacgactggctaatttttgtatttttagtagagacagggttttgccatgttggccaggctggtcttgaactcttgacctcaggtgatccgcccacctcggcctccaaaagtgttgagattacaggcatgagccactgcaccctgccaacggcattagattttctttttcttttttttttttttttgagacggagtctggctctgtcgccgaggctgtagtgcaatggtgtgatcttggctcactgcaacctccgcctcccgggttcaagcgattctcctgcctcagcctcccgagtagctaggatgacaggcatgtgccaccacacccagctcatttttgtatttttaggagagacggggtctcaccacgttggccaggatcgtttctatctcttgacttcgtgatctgcccgcctcggcctcccaaagtgctaggattacaggtgtgagccaccgcacccggccgggcattagattgtcataagcagcatgcaacctggatccctcgtgtgtgcagttcacaacagggtttgcgatcctgtgataatctaatggcgcccccgagaatctgagaggaggtggagctcgggcttgcttgcctgccactcatctcctgctctgtgacccgatagggctcatggtttctaacagacagaccatggcccgatagcagtccatgaccccgggggttggggaccctgttgtaaaggacttcagaaatactgtttcattgaatccttcagcgatcttcctggcattcaccactcctccaggaagatttcagcatccccagacagaggtgggtgtcatttttttctcttctatcatcctctgcgatacgggtggcccctcccagaccttgtctgccaagccgactgttgactaagcattttcagagggcttccttggggaggggttgcctttctttcaagtagcaaatcacttcctgtgttcttttgatcaaagccctgcccatcccaggacctgagcctccctggcttgcttctcatcttggaagaattcccaccccaacagtctcagagctccagctgatggtttgggtgtgaattccgggatgcccaatttctcatcagctttccttttttgagacggagtgtgctctgtcacccaggctggagtgcagcggcaggatctcagctcactgcaccctccgcctcctgggttcaagttattctcttgcctcagcctcatatgtagctgggattacaggcgtgtgccaccacgcccagttaattttttgtattttttagtagagacgaggtttcaccacgttggccaggctggtctcgaacacctgacctcaagtgatctacctgtctcagcctcctaaaatgctgggattacaggcatgagccactgtccctggccctcactggcttcctgaaagaaggtgttgtctctcagactaacaccacctctgcctcttgccctatgtccctgactccaccctagtaagctgtacctgccaagaatcctgcagtggccgctgtcacagccacatgctctcatcctcactgactgaatgacgagaaatgaaagctgaagtggtctacacagcagagagctgtggggtggggtcagccctggccacctcttactttgcgtcttatggtggtacgatactgctaggaatagcgccatgatcacgacagtctccccgttgctatcatcgacagacctcagacttgacaggcagcaacacctctggctgccatcctcctcttgggataagggatgcccaccaaagggtggcatggacgtattcagcctctcctgcctctgctgcagccataccgcccgtcaccggcacagggagggcgtcaatccaccccatcgcttgttagacatagcttcccatctcagccgaggactctgtggcagaacccacagaccttgagaatgttgcaactgaaagacccctgaagagcaacttccgcatctagacggatttccaaatatgacatctgtgggaaccggggccaagagaggggaagtgactagcccaaggctacacagggagacgagagactgggctggactgggaaagggctcccttaatttgcaagcaaaggaggctatgtccttgtccctgcagactctgtgattctccctgggccaccttctgtcttccaggtcctgccctatccttggatccagggataccaccctggcatccccaccacctacagatgggagcttgctccctggtaagggatgctggaggcacctgagctgcactgagagacaccccacccccacagaagtccaccatgcccctcccctcaccccaatttctgatggtcatttttaggacacctccacctggctggtgtccctcctctttcttcttccagatcccacccttgaaggacttaccatggtggggggctggtgtctgggctcctggaggctcctgaatgggtcgtgatggaggtgcaggttcagggggatcttgggggtggcttgggcatggccctgcttctgcccgttcaccggactcccggctttagttcctcttacaacagccccttctcacttcctttggcgggaggggccgaggccatgggggagggaagctgggtgtggaggggggcggggagctggctgtttggggctctgagcctgaagggaggggtcagaacttgatggcagccactactggacctcagaggcctcttccccaactccttggggacagggctgctgcaggaacatttgggtcagctggctgcaggacgaaccacctcttttcagggcgattcaggaagcatttgggcttcccgggtctctttttaaaaccaaggaaggggcccaggggaggtggctcacgcctgtaatcccaatactttggggggccaaggttggaggatcgcttgagtccaggagtttgagaccagcctgggctatatagcatgaccccatctctacaaaaaatgaaaagaaaaaaaattagctgggcatggtggcatgagcctgcagtcccagctactcagagggctgaggtgggaggattgcttgaacctgggaggtggaggcctcagtgagccctgattgcgccactgcactccagcctgggcgaaagagtgagaccctgtctctaaaaacaaaccagaaaaaacaaaaaaaccaaaaaaacaacaacaacagggaagggtgccttcttcagctgtgtctgctctgggcatccctgggcaacctccttcattattattattgttattattttgagacggagtctagctctgtcacccaggctagaatgcagtggtgcaatctcagcttactttaatctccgcctcctgggttcaagcgattctcctgcctcagcctcctgagtagctgggattacaggtgcccaccgccacacctggctaatatttgtatttttagtagagacggaatttcgccatgttggccaggccggccttgaactcctgacctcaggtgatcctcccaactcggcctcccaaagtgctgggattacaggcataagccaccacgcctggcccaacctccctctttagatgaccctcagaagtcacacgtgtttgtgtgcagaagtggagggtactgggaagcaggtgcatctgaaaggtccctgactttggatgtcacatctagatttaacagcctccagtttggctacttcctggatgacttagttactcccttttctcattgtaaaatgggaacgtgggtccccccagcagagcctggcccaggtacgtgtcagcctatgagctggtctttgggacaccagccaaccacctgaggctcctcttgacatgtgaggaaatggcagttctaataggttgttacttccccacaccacccagcaaggaggtggccgaggcaggacccgaccctgggagaccctgggggacccatgttcagatctatctttggtccagggcgataaacccgcatcccccttgaagatgttaatatgcagcgcccctagtggccacagctgggaaggagcccgtctctgctggaatctcctgagcgagtttgcagaattgacgggcttggggcatgcaattctcagcaatgtctccaggcactcaagagtgaatatgaatgggtaagaggaccccactttgttgggggccatcaggggaggcttctaggaagaggcaacgtttgtgctgacaccggcgagtaagctggagttaaaaaaggtaaaggggcaggagcgtgcacctggccatgctaagcgctcaagcaaaggcccagatatgggaaaaccatagggcaattgaggaagttcggggaggctggtgtggctggagcatgcggagtgacggagagtgtgatggccagggtggcaggtgctagaccgtgtggctttaagagcctctgtgagggccaggcatggtggctgatgcctgtaatcccagaactttgggaggctgaggtgggaggatcgcttgagcccaggagttccagaccagcttgggcaacatagcaagacctcgtctctacaaaaaattaaaaaatcagctaggtgtgctgttgcacctataatctcagttacttggcagggtaggcaggagaatcgtttaagcccaggagttcaaggctgcagtgagctgagatcgtgccactgaactccagcctgggctacagagtgagaccctgtctcaaaaaacaaaaacaaaaaagcaaaacccttccacgagaagctgttgtacttttctcctaaaatccctgggttcctgtctgcaatgttaaaagtccccttctggctgggcacggtggcccatgcctgtaatcccagcactctgggaggccgaggcgggcagatcacgaggtcaggagatcgagaccatcctggctaacacggtgaaaccccgtctctactaaaaaagtacaaaaaattagctgggcatgttggcgggcgcctgtagtgccagctactcgggaggctgaggcgagaatggcatgaacccaggaggcggagcttgcagtgagccgagatcgtgccactgcactccagcctgggcaacagtgcaagactccgtctcaaaaaaaaaaaaaaataaaaaaaaaaaataaataaatcagctgggtgtggtcgtgcacgcctgtagtcccagctattcagaaggtggaagtgggaggatcacttgagtccaggagatcaaggctgcagtgagctatgataggcatagctgggcgacagggaccgtctcaggaaaaaaaaaaaagaagtccccttttggctgttgggtagacctgggagaatgggtggtcctttccagacctgggtgggggctactggatgcactgacacacacacaccgcaattcgtagaaatctacacaagacagaactttattgatgtagggcttcctggcaggagtgtgtgggccccagggcagggtctgtagcaccatgagggggtggcctggatgtcggggtgcccctggggcgggcagggcagaggttggggtggatcctccccctagtcaggtcaggggagggtgtcagggaggtggtgctacccccccccctcccatagcagacacagattcccccccagctcggagtggaggggtagggcagtgctggggggcagggcaccggcagaccacctccccacccctactcttcacagtacatattccgatcaaaggagggggggagtgttggggactccctaagggtgggttcaaagggtgctggggtgaacagctgtcccctccccagacccaccctggagggggggtctcactatgtgaactggaaggggcggatgctgaagaggggctctggggggatagccagcccctctccatccccccagccagggccctgcaggggttcccaataaataacttccggctccgtctcacccttccctcccagttcccgcccccccggggccccctctggccggcccgctgcagggctggcggcggagaccccgccagctgtggctccgggtgccgcgcgccccctagtggccatggcaggttttgcagcacatctggcggaagtaggctcggctgcagaactgaaatttgagcaccagggggcagtaggcgaccttgttcacatccttgcactctgcggggacgggagaaggaaggaaaaatcaggtctcagctgccctccccgcagggctgcacacacgacctgcagtgcttcctggccagtgactttctgtgccttggtttctttctttttaaatttactttttttttttttttttttttttttttttacagatgttatcttgctatgttgaccaggctggtctccacctcttgagctcaagtgatcctctcacctcagcctcctaagtagttgggactacaggtgtgagcaaaccacgcctgacttctgtgccttagtttcctcaactatcaaagggggcttataatagcaccgatgtcactaggctgttttgaggatttaagagagagagtgtagggttgggggccaacacagacacattagtaatgagaaaagggccgggtacagtgtatcatgcctgtaatcccagcactttgggagaccaaggcaggaggactgcttgagcccaggagtttgagaccagcctgggcaacatagtgagagcactgcatctacaaaaactaattaaaagaaaaaaataggctgggcatggtggctcatgcctgtaatctcagcactttgggaggccgaggcaggtggatcacttcaggtcgggagtttgaaaccagcctggccaacgtgatcaaaccccatctctactaaaaatataaaaattagctgggcgtggtggcgggtgcctgtaatcccagctactcgacagcctgaggcaggagaattgcctgaacccgggaggcagaggtttcagtgagccgcgattgcaccactgtactccagcctgggagacagagcgagactctgtcacaaaacaaaacaaaaaaacaaaaaaacaaaaaaaaaaaaaaggaaaaattagccgggtgttgtggcatgtgcctgtagtcccagctactcaagaggctgaggctggaggatcgcttgagcccaggaggtggaggctgcagtgagctatgatggcaccactgcactctagcctgggcgacagagcgagaccctgtcaaacaaacaaacaaacaaacaaacaaacacgacccaataaaacaaaagaagacaaatattccctttcctttccattgttccttttcatagcacccaggaaaaaatgtccatttggggctgtaatcctcactcgttttcttttttaataaagtgaagataggccgggcatggtggctcacgcctgtaatcacagcactttgggaggctgagtcgggcggatcatgaggtcaggagatcgagaccatcctggctaacatggtgaaaccccgtctctactaaaaatacaaaaattagccgggcgtggtggcaggcgcctgtagtcccagctattcaggaggctgaggcaggagaatggcgtgaacctgggaggtggagcttgcagtgagcggagattgcatcactgcattccagcctgggcgacagtgagactccgtctcaaaacaaagcaaaacaaaaacaaacaaaacaaaacctgaagctcttgagtcccagctgagtgggtgagtcagggtatttttcagaacattgactattttgtgtgatcatgatgtctgttgatgactatggatggatatgagcttccatctagcggccagtgatttatggcaggaccaggggcgaattaaaagctacagatggattttttttttttttttggtcgcccaggctggagtgcagtggcacaatcttggctcactgcaacctccacctcctgggttcaagagacactcctgcctcagcctcccgagtagctgggattacaggcacatgccaccacccctgtctaatttttgtattcttagtagatctggggtttcgccatgctggccaggttagtctcaaactcctgacctcaggtgatctgcccaccttggcctcccattgtgttgggattacaggcgtgagccaccacgcccagcctaattttattttttgtagatacaggtgtcttactatgtctctcaggctggtctccaactcctgggctcaggcaatctttccagttcagcctcccaaagtgctgggattacaggcatgagccacctcgcccggcctgggtggatcattttattgcatctcccttctggggcacccctcaagtgaatatatcatttacatcccgtgacagataaagaaacaaaaacacagaggtggaagatgaacccaggtagtttggttgcagtgcccagactaaggaattaattgttctctatcaaaaataaatttatggacctggcgcggtggctcatgcctgtaatcccagcactttgggaggccaaggcgggcagatcacctgaggtcaggaattcgagaccagcctggccaatatggtgaaaccccatctctactaaaaatacaaaaattagctggtcatggtggcacgtgcctgtaatcccagctgctcaggaggctgaggcaggagaatcacttgtacccaggaggtggaggttgcagtgagctgagatcatgccactgcactacagcctgggtgacagagtgagactttgtctcaaaacaagaaaaaaaaaaatttacagccaggcgcagtggctcacgcctgtaatcccagcactttgggaggccgaggcgggtggattacttgaggccaggagttcaagaccagcctgggctacatagaaaaaccccgtctctatcaaagaatacaagaatacaaaaattaactgggcactgtggctcttgcctgtagtccttggggagacttggggctgagacaggaggatcgcttgagcctgggaggtggaggttgcagtgagccgagatcgctctactgcactccaacgtgggtgacaaagtgagtcccggtctcaaaaataaataagtaaataaggctgggcatggtggctcacgcctttaatcccagcactttgggaggccaaggccggcggatcacaaggtcaggagtttgagaccagcctggccaacatggtgaaaccctgtctctactaaaaatacaaaaattagctgggtgtggtggcgggcacctgtactcccagctactcagcaggctgaggcaggagaatcgattgaacccaggaggcggaggttgcagtgagccgagatcaggtcactgcactccagcctgggtgacagcgagactccatctcaaaaaaaaaaaaaaaaaaaaaaagtaaataaaaaaataaaaaaaattacctaggcagaaaaaaatgtgtatacttaaaagcagtggttctcaagggaagtgatcgattttgacccccaggggacattgggcaatgtctggagacgtttttagttgtcataacttgggagaaggctgctactggcacccagtgggtagaagccggggatgctgctgaacatcttacaggctggcacaaatcccagcactttgggaggctgaggtgggaggatcgcttgagcccaggagttggagaccagcctgagtaacacagcaagaccccatctctccaaaaaagaaaaacaaacaaacaaaaaaccctacaatgtgctggacagctccccacggcaatcatctagctcaaaatgtcactagtgcctgaggttgaaaaaccgatttaaaggaaaaatattcaggaaattgtgctacaggtggagatgaataggtacaggttatgaaagtgactggggaaatgtcacaagtttgggtgcacagaagggtcaggtgcctgaaacactcagcatacagtggcacttaataaatgcttgcagggaggggatggtgaaggatggcctggcagagacacagcaatgcatttccgaggttccagaagttctaggatgaagtcaggacccccaatgccctctgtggctgcctctggccaggaccctcctggcgcaccctggctggtcacccacataccttcagggccgtccccgggggttgggctgtcgcacttggcctcacactgctgcgtggtgggcggccgcagggcctccgtgcactcgtgcgacgcctggcccgtgtggctggtgcagcgcaccgagcgctgccgctgcccgacgccgcactgtgcagagcactgcgagggggcaccactcagttgctgccccgcagcccctgccctggcccccacccctctggggcgcgccctcctacctcaccccactcgccagccacccagcgggccggggggcagcggcgcaagttgcagcgcatggtggccggtggcttggcggcgggtgagcagtgcgccgggggcagcgtggcgcggtggtctgcgctcttgcaaaggaccacgcggtggcggaggcccggcccgcagctgggggtgcactgcagttggaaggggcgtttcgtgctcagggtgctgccccagtgcgaagtgaggaggggacagctaacctggagaccgcgcagaggcgtctccgtggacaccccacctgggcatcccagtgggcgcgaaggaagggggcggctgacctcagaccagtcgagggccgcccactccggagggcaagtggggccgtggcaggcctccagtacaggtgggcgcggctgcgggcatgcgctgtcgtccagcgccttctcctccgcggcagagacgcggcgctggcacacgaccgagcggctgcgcacgcctgcatcgcagctgcggctgcagagcgaccagttccctacaacccagctgtaagagatgaaggggtctgagcaagtaagcagggcagggggtcccaacacaacagcagggggcactatagcctacccccacccttccaatcacccagcctcatatggaaactggcaccaggcacctccacattccacacttggggcatcgttagcctgcacccagactgggggcagagaggtgcattaccctaaggagaaataaatctttggacaatgcgagtgaccaggcagcgccatcattctgactccagggccatgcagctttgaccgccaccttgggggcactattaccttggactcccccataactcctatagaaccatcactgcagcactcggcccactgtcactccgactctgcactaatctgctccccacccccctggagcactcgctcttgactccagggagtactctcctctcaccctgagcaacactgccccctggcggcactcactctggagggcaaggctccgtgttgcaggcgcgctgccttttgggcagcttgctgtgggcactgcagtagtggggggcgaccgcggagctgtccagctggttgcggcactccaccgcctgcacctggctacctggaggggagggtgagaggcctgctcagcccctcccggcccagagaacctcagcccaggtatcttgtgccttcccccacccccggcctcaccgcctgcacactgggccgagcacttggtccagggcgcatagtgccaggagtaggggggcagcgagtcacgggcgatgggggcattgaagcggtagcggagggcaggcagctcggtccgggccagcacctggagaaagggggcggcagccagtggaaggatcgcatggagtctctaattccaaaggctgcaccttgcccccagtctccctgttaccatgacgatgagagatgcattaatcggtcccagggcttcgaggctctggacctggtctggcccctgtcgcagttgaaaggtggtcccagctagaggcagacggtggggctggggggtcccaggcagcccctccagcagcagggactcctggtctcccttcagggctgggggacgatgcagggttcagaattctagtcatgctgaaaccgccctccccactgacccctaatcctcatcccctccccaccatctgctcacccaagtgactgagagagaggttcagatcctggatgaagatgtggacggagcctttgggaatccagacgacatcctcgtaccctgaacagcagagctcagatgtcacccacttggcatgtccccaacacctgcctgcctcccctgtccccggcccatgaggataacagctaactattactgcgctaaacacacatctaactgcacccctgccccacccttgtgaaccaggtgtttcattatccccattttagggctgacaaaactgaggctcagagaagctaaggaacttgaccaggttttacagctaggaaatgactgggttaggatttttctttctttctttctttcttttttttttttggagacaggatgtctctgttgcccaggctggagtgcagtgaagtgatcttggcttgctacagcctcagactcctaggcttaggtgatcctcccacctcagcctctggagtagctgggactacaggcgtgagccaccacacctggctaactaaaaaacctttttttttttttttttttttttgtagagttgggggtctccttaagttgctcaggctggtctcaaactcctgggctcaagtgatcctcttgcctcagcctcccaaagtgctgggagcaccggtatgagcctggccagctttttttttttttcagacaggatctcactctgtcacccaggttggagtgcagtggtgcgatcataggttactgcagccttgacctcctgggctcaagggatcctcctgcctctcagcctctcgagcagctggaactacaggtgtacaccaccacacccgcctaattaaaagaattttgtagccgggcacagtggtcacgcctataatcccagcacattgggaggctgaggcgggcagatcatgaggtcaggagattgagaccaacctggctaacacggtgaaaccccatctctactaaaaatacaaaaaattagccaggcgtggtggcgggctcctgtagtcccagctacttgggaggctgaggcaggagaatggcatgaacctggtaggtggagcttgcagtgagttgagatggcaccactgcactctagcctgtgtgacagagcgagaccccatctcaaaaaaaaaaaaaaaaaaaagaattttgtagagtttggccgggtgtggtggctcacacctgtaatcctagcactttgggaggcttaggtgggtggatcgcttgaggtcaggagttccaggccagcctggccaatatggtgaaaccccatctcttctaaagatacaaaaattagccgggcatgtagtgcatgtctgtagtctcagctacttgggatggtgaggcaggagaatttcttgaacctgggaggcagaggttgcagtgagccgagatcaagccactgcattctagcctgggtgacagattgagactctgtctcaaaaaaaatttttttttttgtagagttggggtctccctaggttgcccaggctggtctcaaactcctgggctcaagggatcctcccgcttcagcctcccaaagccctgggattacaggtgtgagccaccgtgcctgtctcacttttgatgccagcggccaggctgcttattataaaaccccaatgggactctacctggggactgaaactcacactctgcaacctactcctgcctcacctggacacactccctccctctgacagtgcctacggcttcctcagccttccagatatttcctgagcctcctcccctcttgcccactccctgggctctctgtcacttgcccaaagcccaagctggaaaaggtgctttctacattctctgaatatcccctcccgtagtaagcctttccctgctagcacagaacattcattctcgcagctcctctggctcacagaggatggaaagtgatgcttgcttccacccagacgtggcatgagcttctccaggaggcagaggagacagattcgggctcctgtctcctgagacactcttttttttttgagacagagcctcgctctgtcgcccagactggagtgcagtggtgtgatctcggctcactgcaacctccacctcccaggttcaagcagttctcgtgcctcagcttcctgagtagctgggattacaggtgctcgccaccacgcccagctaatttttgtatttttagtagaaacagggtttcaccatgttggccaggctggtctcaaactcctggcctcaagtgatcatcctgcctcggcctccaaaagcgatgggattataggcttgagccacttcacctggctgagcccgcaggacttttggggactcctgacactccacggggcccctggggtctgaggagttagtgatctcagctactgcactgggatcagttccacctgcagtcagctggcccatgcagggagtgtgggagggaagctggagactctcaccggccccaggtgaggctgggctgaagacgccctcgatggtctcgcaggcactgccgtcaccgccacacactcggcacttgtcctcccgcaggtcggagcccaggactcggtcgcagcccacgtgctgcgtggagaaggcgtgagtgaggcgaccccctaacccacccccgctccccatcccctctccacctccctgggagtcccctccaccttgcattcgccactgacgcaaatgtccaccgtgtctggacggcagggtgtcccgtccaccacggctgccgccctctccgtgtagaagttgaagccttccgctaggcacgtgagcgagcaggccttcacgccccctggggggcacggccccgtcacaccacgggccaggccaccccggaactctttgcttgctccctgggggagtgaggccaagagggacagaccccagacccaagaggaagggcagcttgggcagagggagtgggggctcccagcgtcacgttgaacccccatggtaccgtatcccaggtactctgtctccccgggtggggacagggctcagggcagaccccgggatgctgcattcatccacctgctgctggacactcccacggctgcccttcacggccccacagcctttggagtcccacactcacctccccggtacgttttccacttgtagaatttcccacggaaagggatgctgtcaaattcagaacactgcacttctctgaagtcctgggagccagggggacagtcctgggggcaggagaggagagatggagggaggccaggcttggggggatggagtcagaaaaggggtgctcagagaaagatgggctggaggagggaggctagaggcagggaggccagggaggaggctgtggtggtctgcgtgagactaggcctggaaggtagcctgggctgggcgtgtagacacatctgggataggactggatccctcattagaggtctgagggtgagctgggcaggacacacctgggtttctggttccaggctatggaatctttcttgcttgcttgcattttttttcttttttgagacagaatctcactctgtcgcccaggctggggtacagtgcatgatcttagctcattgcaacctccatctcctgggttcaagcaattcttctgcctcagcctcccgagtagctgggattacaggtgcatgccactatgcctggctaatttttgcattatttatttatttatttatttatttttagacagagtttcgctctcgttgccctagttggagtgcagtgacacaatctcggctcactgcaacctccgcttcctggattcaagtgattctcctgcctcagcctcccaagtagctgggactacaggcgcgtgccaccacgcctggctaattttttgtatttttagtagagacggggtttcaccatgttagccaggctggtctcgaactcctgacctcaggtgattgacccgcctcggcctcccaaagtgctgggattgcaggcatgagccacctcatccggcctaatttttgtatttttagtagagatggggttttgccatgttggccaggatggtctcgaactcctgacctcaggtgatctgcctgcctcagcctcccaaagtgctgggattataggtgtgagccactgcacctggccacatggagtctttcttgagagagaaggtctggaagggatcagggtttatagaaagtgctagcatgtggattctctgaagacctggttccccccagctgggaggctgaaaagtccaaagctctcactgccctctaaaacaccccctccccagtaaacttctcactgctcactgatggttgcaggtcagctgagggcacaagcagaggacagacacctgtcactgggtttggtgagaggaagcttcagctacaactttgggggatgacagaaggcaggggtaggactcttcaggggaagttgggctgtaaagggaggggagagactggatggtagggggttgtgagggccaagcagtgatttcaaggtgggggcttgtagtctaaatgtaggaggaaaagagagctggaaggagccaggtctttaaggaggaggggttggggacgagaaggtggtgggggtcagggagaggagggaagagaggggtggcggctgcaggttccccaggaggcagcaggtgcctggatgaagcactctgatagcgtttttgtttttttttttttttttgagatggagtttcgctctgtcacccaggctggagtgcagtggtgcgatctcggctcactgcagcctccgcctcccgggttcaagcgattctcctgcctcagcctcccgagtagctgggattacaggcgcctgccaccacgcccagctaatttttgtatttttagtagagacggggtttcactatgttagccaggatggtctcgatctcctgacctcgtgatccgcctgccttggcctcccaaagtgttgggattacaggcgtgagccacggtgcccggcctctgatagctgtttttaatgcttcctccccccacccctcaaggggtttgggggaactcacatccgtgttgcaggagcggtgccgccttctctcacccagacagtacttgcccccgatggttggcctggaaagggtggtgggataggagagggatgaggcagtgggcgatgggggcaggggtcgcgctgccctcccgggtgggggtcctgagggctgacctggggctgtcgcagtgacggctagaagaggacacgccgccgccacaggtccggctgcagtcgccccatggagtccacggcccccaggctccgtccacaccctctgggcgcgacccaaaggggacacagacccgtttgtagcaccactgggtggggggagacaggaaggagtgagtccagcccggaggacactcgtcggccccatgcaccgttccccactccaggccccagccagagatatcagcctctccgggatgggcagaggcggggtctgaacatgcgaacagagtcaggttacgtaggagagtggtctgggagacagaccaggtacaagcgagaggcgtggcctgagcacagggtgcttaacggggaggggtgtagacaggaccacgataagcgtggagacgaggtggggcgtggcttcaggctggggaggggaggtctacaggcagtaggcgtggccagagccgagggcagcacaggggatgggcgtggccaatgagggagagagcaaacagtaggcgtggccagagccgtgggaatcattacacggtgggcgtggccaacgcgggagggagttaaacagtaggcgtggccagaaccaagggacgcatagacggtgggcgtggccaacgcgggaaggagcaagcagtaggcgtggccacagccgagggagcacaaatggcgggcgtggccaatgtgggagggagcagataataggccgaaggacaggcgggtaggcgtggccaacgcgggaggtggctcagggggcgtggcccagttgggggccctggccggcgctcacccccttgtcgatggtgtgcgtctggcacagcgtgccctcggcggccgggatgctgttggtgatgcaccggttgctcttgctcagacaccacagctcgctgcagacctcctgcgggccgaggtgcccgctcaggctcgcccccctcccttcctccctggggcagcccgcccggcttgggaggacccagatgtccggctcactgccggtcccagagcagagagcccggtgctcccttcctggctcgcggtgggtcttcgtgcatccccttgcggggcatggcctgtgacttatactctcccaataagctccatttatggagcactttatacatgccatatacctctttaggcagtactaccccatcttactgggagaaaaccaagcttcagacaggtaaggtcacacagctactaagggaatagcctggagtttaacccagctctttaattcagagtctgtgctctaacgaactttgcaattcagttcctggtgccttctgagtttctggaaggaaacgtgggaactgctgaggaatgaacaggaaggatttggggttcttttatgggatgggcaaagtagccgaagagaaagtggtggttctgagaaatcggcctggatgatgactaggccaacggcctcatctctagttttttccagctgttggttctctttgttcccccatctaaactggagaagcccccaacacttttaagctatgtggaggggtgggagtttgggaggggacaatgccgagttaggtctgtgtgggacatgcctctctttctccaggtgaaaaatcagccccaccttcttcccgtctgaatcctggatgggctgaactagtcccagggactcactctgactcttaaagtccaggttaatatccctggagaagccccagtgagttcaggtgaagcaaaatctctgaccctcttggcccacatcctaagcaacctcccagcgtctttcctctaaaaagtaggtggtcctctctgaccctcttggcccacatcctaagcaacctcccagcgtctttcctctaagaagtaggtggtccttctgtaattatcaagtgtaatccccgctttgaacccaattcttgtaagctttccagatgtgggactggatcgatcaatggccacaggaaaggacccttcctaggtcagcccctgagagatacctgtacatatgtaagaagctggaagagttgttctcaaatacattctccctcaaaggtcctctagaatctctgccttctgccttatagaggacatttctcagctaaaaactcagactgtgtcctcttggccatatctaaaaatatcacatcagtcctgtcgcaatcccacttctgacacctcttcaagataatgatttcagctctgcttttgtcctcctctccacaaggaggcactgtggcatatttgagttgtgcagagacctcaattctgctaccaacttgcaatatatttcccctctctgggcctcagtttactcatctacaagatgggcagcctaatgcctgtcttgcctatataaatggctatgaggcacgtgacaggatagataagaaaggacttgcaccaatgccattatggggtaacaatgaccaccactatctctggaccaggcaccaggctgaaccctttacatatattaaccagttcacatttagtaaataaatccccctttgccaagatggcctgaaagatgttccttcaaaaactaaaaggaaggctcaattcaacatatagccagtgccagcccaagcttgatattttgacagctcctcccctcccctgcccctttgtaaaatttagagagtcatgagagacctggatttaaatcccagctctgtcatggtctcaaactgtggccttggacaagtcatcctccctatgctatggctcagtcccttcctctgtaacgtgggggctagcaggattgtcaggagtttagatggtgacacacagcacatgcttagcccatagtgagagctcagtaaatgtcagacaccatgatcattgttaggatacctgggtcacagcagatgttgaggagtagcttcagaattctttaggaattccttagagggtgctgcagttaccagctaagttaggatgttggggggtgtcaagggtggaatgtcagtgaaatagaaattgttccagggtttgtctctgtcttgcagtggaatgaagggagggcaatttggcagctgcttgccctctgctttgcattaacatggcatcacaaaaactctgatcgtttgagttgtgatagtgtgaagaactggggctgaacctgggcccctagggctgagactgtgaggagcttaggggtgcatttagggaatcgaggcaggtgggcagaggaggagcagatcctggctgaaccttggtggctgaagcaggaagccagcaggtcttcagcttcctggggggagctgggagtggaacctcctgccccccaatgcccttctctatgcacgaatggggctttgggaatctaaacctcaggaaagggtggggagaggtcaggaggctcagagctcctccagacagggagtccctggaaggttctgtctagttctttgccaagtaggaaagatggctcatccccagggaaattatttccgtcaggactggatgtttagttaaaaactgccccgtgagaggtcttgagactttgatcctgctgtagcccacagggggtgtgatgtgccagacagaagctggccccccagcccagccctcaaatcaggggtctggagaagcaggtgatcccatttttgttcccaagcactgtctgattgcttaggacattttgcacactccatgcacctctgtcctcccaggtcaccatgggggctcacctcaccccccttcccggttctcccaccccctcacttcccaggtgggtgccctggtggagttccctcccccagccccagcggccccctcccctcccaggaaggaaagcaggaagactctctctaccccgtatttacactgacgcgatttgactccatgctgaaagcggcattgctcatctgcatcgtaggcttggcccggtgccactgtcgggtacacaaagtcctgtctggggggccggttgttcaggcagagccccaggcccgagctgcctcgagagaaaagcaactgtcatgctaggtggctgcaaatcaagagctcaggagcctcagctggatgggggtcccagggagcatccctgatttctatcgtctcccgtgtaccctgccccaccatgagtgtgacccgctctgagggacacccaggtgcatcctcactctagaaagctggtgatgtagtcacggctgcaggatgaccacacgaatgggttggtcttcatggtaatgtgggcagccatgagcttggctgggtcctgaccacgggccccacagctgtttcccacgccgtcatggttcatgccgaatctggggaaaggggtgtcggctctgccgggcgctgagggacccgcccagctcctcccctcctccccctcttgtgtgccctggcctcacgtgtgcccgatctcgtgggcaatggtgaacgctgtggccaggccaatgtcctcattgacgctgcagcttctctcgcgctcacacattccgcccaccggggccaggcctgggaagacggacatgtggggatggggctgggaggctcaggacggtgctggctggccccatccacctgccaggtctcaccccagcccactgccttcataggcgcctgaaacctacggggctcgggtacctagtgtgccgcagggtttgttcttgtagatgcagatgtcatagctgtaaaaggagacagggtcagtgagggggctgggctgtctccctaagccctgctgatgccaccatgcccagctctgggggttgagtcctgccttggaggcgccatctgcctctcacctgaagctgcatacaggagtgactgaccacatgaatgaatgaatgcatgcatgcatgcatgagtgggagaataagtgaatgagggcatcggtgcccaaatggtcccaaacctcccttacccattattctcaagcagcccctccccatccctggctccctcatgggcagcccaaacttctctgctcctcctgaccctagcagaagtgatctctgtttggactctcatggttccctggaccatctgttttctcagccccagtcctagacctctcctgtcccctcaccgtgtgatgagcactgctgtgtcatggttagccacaccgttctctggaatggcattgccatggccgctgtggttcacgatggatttctgccacttacagaagctgtccagggacttcccggcatggtgggtgatctccagagtgggctggggatggacagagggaaatgcatgggcacccaccacccaggggacggcaggacatgctggtatgaaggggaaggggaaggggaggaagtcccccgcacctggtcctccgtgagcaggatgaggcgagttacgaggatgttaacggtgcttcccagactcgagtcctggaaaagtttggcaacctgacctccaagaaacaagagagaccgagtcttaagaggagcccagggtagaaaatgaaaagcaaaaacaatgataacagcttgctttcatcaggcacctactgtgtgtcgggtcttaggctaaacctgctattagggttttttgttgctgttgttgttaaagatgggggtcttggtatgttgctcaggctggtcttgaactcctgacctcaagtgatcctcctgcctggcctcccatagggctgggattacaggtgtgagccaccatgcccagccatgtatcagtcttttcatgaataggtaatatttgctgttgttactatttgttgttgttgttttttgagatggagtctcgctctgttgcccaggctgcagtgctgcggtgcaatctcagctcactgtaacctccacttcccaggttcaaatgattctactgcttcagcctcccaagtagctgagactataggcgcacatcactatgcccacttaatttttttttttttgagacagagttttgctctttttgtctagggtggagtacaatggtgtgatctcagctcactgcaacctccgcctcctgggttcaagcgattctcctgcctcagcctcccgagtagctgggattacaggcgtgagccaccgtgcccagccatgcccgcctaatttttgtatgtttagtagagactgggtttcaccatgttggccaggctggtcttgaactcctgacctcaagcgatcctcctgtcctggcctggcacagtgctgggatcacaggtgtgagccaccatgcctggccatgcatcagtcttttcatcaacaggtgctattatcatccccaatttacagatgaggagacatgcaaacagaggttaggacacagctggtaggtgtcagaagtgagactcaagtctggattgcttaccagaacatttctttcagactcctccaagctcagcttatctacttgtcccccaacccctgcttacccccctgactgcctcaagcatctttgtccagaggcgacctgagggatatacatgtctgagttcattccacagctgtctgaaggtaccaatttgcccatcaccacaggaaagtaaaactgtgagggcaggaggctctggagacagtggtcagaggaaaggaggaagcagccccagggatgagctggcacagaagacagaggccaggctgtgcagggatcttggaaccctgggtaatcatttccccgtctggaaatccccagaattttttttttttttttttttttttttttggagatggagtctcactctgttacccaggctggagtgcagtggcgcaatcttggctcactcacctccacctcccgggttcaagcgattctccagcctcagcctccggagtagctgggactacaggtgcccgccaccacgcccagctgatttttgtatttttagtagggacaggatttcaccatgttggccaggcttgtttcgaactcccgacctcaggtgatccacccgcctcggcctcccaaagtgttgggattacaggcgtgagccactgcaccgggctggaaacccccaggaaattctgaaagccctagggagagaggccaggctcaggcacaactgagggccatcagagacgacactacacaacattttggaccctctgcctgtctgctaaactttttgttttcccttttgcttcagtgaaacaagagcaccattcatcaagcccttactatgtgccaaatagcctacctggcttcccttccaccaatccttactctctagggtagctaccattatatctccatttgatacactggtacgctgaggcttagagaggtcaagaatctcgcctgagatctaggatggaaatggactatatctgaaggtgggttggggaggtcagcctgtaggaatttataagtaggtgcttgtgcaagaatgctgcgtgaatacggatgtgtgcctgtgtgtgtactgctaacctcaacgagtacctgtgagctacctatctatcatctatctatctattttgagatggaatttccctcttgttgcccaggctggagtgcaatggtgcgatcttggctcactgcaacctctgcctcccgggttcaagcgattctcctgtctcagcctcccaagtagctgggattacaggtgcccaccaccacgctcagctaatttttgtatttttagtagagacggggtttcaccatgttagccaggctggtcttgaactcctgacctcaggtgatccacccaccttggcctcccaaagtgctgggattacaggtgtgagccaccgtgcccagcctactgcgatttatttatttatttatgaatgaatgaatgacagggattataacccactgcgtctcaaactcctgggctcaagtgatcctcctgcctcagcttcctgagtagctgggactacaggcatgtgccaccatgctctgctaatttttaaatgttttgtagagacgggatttcactatgtttcccaggctgctgtgtacttatttttttatttttttttgagacagagtcttgctctgttgcccaggctggagcacagtggcgtgatctcagctcactacaacctccacctccctggttcaagcgattctcctgcctcagcctcctgagtagctgggattacaggtgcccgccaccacgcccggctaatgttttgtattttttagtagagacggggtttcaccatgctagccaggctggtcttgaattcctgacctcaagtgatctgcccaccttgggcatgagccactgtgcccagcctgtgtgtatttttacacacagcaaacacttatatgccacctactgcatgccaagaactgttctacatgctttatgaatgcactggatctaccttagctttataaagtaggtaccacaattatgcccattttacagataggtaagacaaggcagagaggtgaagtaacttgctcaaaggcagacagttaaaaagtggcagagcggaaatttaagcccaagcaggttccctctgccccagggcacctctgcatctagtcactgtgcttatgctctttctcctcctcgttcattgccatatgcaaccaacctacctacctaccttccttccttccttcctctctctttctttcttttctctttctttctgtcttttcttttctttcttttcttttttttttttttttttgacagagtcttgctctgtcgcccaggctggagtgcagtggcgtgatcttggctcactgcaagctctgcctcccaggttcacgccattctcctgcctcggcctcccgagtagctgggactacaggcgcccgccaccacactcggctaattttttgtatttttagtagagatggggtttcaccgtgttagccaggatggtctccatctcctgaccttgtgatctgcccgccttggcctcccgaagtgctgggattacaggtgtgagccaccgcgcccggcctgcaaccttcctttctacccctgtccccacgtcagggattggggtgggatggtagccacccccttgcctaacactgcaggctggctccaagtcctcagggctgcgtgcccagggaggggaaggcacttacaatgttcatgatggccaggacatactgctccacatcccggcgcccgtgataggccaccatcatcttgtcagccaccaccagggtctccacgtagcgctctcggctgaccgatcgcttcaggcctggctggccacgctctgtttcattccccaggggcctggcaggcggtggcttcaaggtccgcagccaccatggccgccctttccacggtttctcatctggggaacccagtagagcaattaagccctgccctgctggtgggacgcagagctgcctgacaactgtcttgtccaacctctgactggctacctctctacccaacagtctggacagacaatttctggtcattctgctgccttctcttgttgtccagctacctgtgtgatggtctgtctgcccaatgggctgccaaacacctcatcgtttttcttattctttttttttttttttttgagacggagtatcattctgtcacccaggctggactgcagtggtgcgatcttggctcactgaaacctctgcctcccaggttcaagcgattctcctgcctcagcctcccgagtagctgggatgacaggcatgtgccactatgcctggctaatttttgtatttttaattgagactgcatttcaccatgttggccaggctggtctcgaactcctgacctcaagtgatccacccgtctcagcctcccaaagtgctgggattacaggtttgagccactgcgcctggctgcctcattgttttgtctatagggcatcttggcggtaccatctcttttttttgtcagtgtcctactacctgagaatattgtagtctaccatgatgtcactgtccctctgccaaactgttgagttgaataacagcctgacttctcccactgttggttgtatggctgttccactgcctgtttgccaacctgttcagctaccagcctgccccgctgcccaaatgtccaactgaacacttgcatgactgtcccacagctaagctggttggttgaatcactgtcccatgatgaccagcatgattgtacaatccactgacaattccactgcccgaatggaatggtgtgaaccagcctgttttgcaatttgaactgtgtgcttggacaacgtgttgtccttctagctgagcaactttccaatcaatgcactgcccaattagatcagttagttctaactgcattgcagttagaacaatcatactgcctgatgtactacaaccagatggtctcatggaccacccaactgtgacatcgtacgtcatccaccttttttctgtctgtactgctgactgtggctgtatgtctaccacagcatcctactcatagagtatctgattatatacttaattcaatatcacactgttctgcttttccatctaacattcatctgattttcttttttgagacagagcctcactctgtcgcccaggctggagtgcaatggcgaaatctcaactcaccgcaacctctacctcccgggttcaggcgattctcctgccttagcctcccaagtagctggaattacaggtgtgtgccaccacgcctggctaacttttttgtatttttagtaaagacggggtttcgccatgttggccaggctgatctcaatctcctgacctcaagtgatctgcccatctcggcctcccaaaatgctgggattacaggcgtgagacactgtgcctgaccctgattttctatatatatattttgaaacaggaccttgctctgttgcccacgctggagtgcagtggtgtgatcaaggctcattggagcctcaatctccctggctcaagtgatcctcctgcctcagcctctcaagtagctgggactacaggagcacaccaccacacctggcttattttttctatttttggttgagatagtgtctcactatgttgcccatgctgttctcaaactcctgggctcaagtgattttcccgcctcaacttcacaaagtgctaggattacaggtgtgagccaccatgcccgaactgacctggtttcctagcagtacgattgtgttggtaagtattttgttggtgtatagctttccttctctctcatttcttaaatgcctgattgtacaaccatcctcctaccagtctgatcgtaaatctggccttttggctgtataactgctggagtatctgatacaaccaccacaccgtctaactgtctgatcagatgataatcctagagaaggaatggttttatacctgaacacctttctggctgtcttactcagtgctgggctaggtgactatagcagggataagattattccatagctccactggttcgccgtctgaggatatgtctctgctgtcccctggatagaactccctattttttctttttgagacggagtcttgctgtgtcgcccaggctggggtgcaatggcgtgatctctgctcactgcaacctctgcctcccgggttcaagtgattctcctgcctcagcctcccgagtagctgggatgacaggcatgcgccaccacgcccagctaattttgtatttttagtagagatggggtttcgccatgttggtcaggctggtcttgaactcctgacctcaggtgatccgcccacctcggcctcccaaggtgctgggattataggtgtgagccactgcacccggccggaactccataattatatcactgtgtccccttctcagcagctccattcttcccctcacataactgcctgctgactttctggataaaaagacactgctgcctcaagggaaagatactgtgtagccctctgcccatccccagaaagaccgatgtacctctcactccacaggctgtgtccaggtgggggtgacgcagagaggaacgcttgtacaccacatgtggtccactttcctccgggctccgagaacccttgggcccaccgtgcaggggctcaatcaggtactcttcctcgtctgccacgatcaggccgtgctgggttttgagaagtgggatagaaagctctcaggatcaggttctggagcttaggacccctgggaccttctctctgtctttatgatttcattcttatcaggtttattttgctatttctttttttttttttggcataggtaattagtgtccatgctatttatttatttatttatttcttcttttggagacaaggtcttactctgtcatccaggctggagtgcagtggtgcaatcgtagctcactgcatcctcaacttcctgggctcaagcgatcctcctgcctcagcctcccaaggatctgggactataggagcacaccaatatgtttggctaatttttaaaatttttaatttatttttcatagagatggggttccactatgttgcccaggctggtctcgaattcctggcctcaagtgatcctcctgcctcggcctcccaaagtgctaagattaaaagcatgagtcagcatgctcagcctctaatttctttttattttaaaattatatatgtgtgtatgtgtatagtatgtatgtatgtgtatacatacacatacacatatataattatatattatatatatttataaatataaaaaatatatatatatatttaaagagtcagggtcttgttctgtcacccatgctggagggcagtgttgtgatctcagatcactgagacctccccctcctgagttcaactgattctcccacctcagcctcctgagtagctaggattacatacacataccaccatgcctggctaatttttatatgtatttttagtagagatggggtttcaccatgttggccaggctggtctcgaactcctgacctcaagtgatctgcccgcctcaccctcccaaaatgccaggactacaggcataagtcaccatgcccagcctcgaattttttgagattgatgtttagctcattaattttcagccttacctaaggctatacattttcctttaagtactgctttagctgcatccccaaagcactgattggctcaaaacacttaaaaaacatcccactatcattccttctctgccctctatgtagaagtgtttttcttaacttccaaacttatgggcatttccccccgcgttccagaatcctcagctcaccaggcctccacaggtgctgatggccacatgggagctgctggcctggccctgcaggtgaccagcgtagaggcagtggggccgggccgccctctgccaggccaggccctcccgtgtccagtactccacggagacgtgccctgccagtagacgggagctgcgggtcaggttcagcaggaagtgggtgctgggcgaggccactttgtagaagaggcgggactcggctgtggcccccgtgccgcggcgctgcctccggggaggaggtggcgagaaggccagcagtgccccgttgtggtccacgcgggtggggaaggcgatctcatagctctccagactggacaggaactcatctgtgggtgagggtcagaggcctggggtgggccctggtcttattggacccctgtgtcctggctgttaggctgctggagcaagtgatgctggcctcactgacccccgaaatccagggagttggctgcaaggctcccgcctattgaccccagggccttcccccattgacccccatcccagccccctgatgcctctttctgttggagcccaactggtctcttacatttttcgctccctccccaccgccaccaccagacttcccctaccttgagaccggaaggcgtgcgtgacctcgaacatgaggcccagccccagggcgagggcccagcggaggatctggcaggcgggagccatagaggccacgtgtccacatgtctctccccagccccggctgccggcagcccccacagtgccgcctcccctgttcacagccttcgcagcatcaccgggctcctgggaggggggagccaggtaagggggcgcctggtcccgctgtccagcacaaccaatgccaaggccaatcatggccaaagcttttcacctgactctgaagattctgaatgcattttctcactcagtcactcccctctccccacctccccttccaatccttcctacactcctacaagaggacagacagggactgggacgctgggagtatctcctatgtgccagctactggccctagttttcacaccactgcatttctgttcttttgttaagagacagggcgttgctctgtcacctaggatggagtgcagtgttgtgatcatagctcactgcagcctccactgcctgggctcaaataatcctcctgcttcagcctcccaagtagctgagattgcaggtgcaagccaccacacctggctaatgtttttgtttttttggagagacgggggtctcactttgttgcccaggctgatcttgaactcctggcctcaagggatcctttcacctcagcctcccaaagcactgggattacaagcatgagccactgcacccagcccaccgtatttcatttccaaaataactgagaagtcatggtcatcacgctcttttttttgagatggagtctcactatgtgacccaggctggagtgcaatggcgcaatcgcggctcactgcaacccccgcctcccgggttcatttgattctcccgcctcagcctcctgagtagctgggattacaggcacgcatcaacacgcccagctacatttttgtatttttagtagagatggggtttcaccatgttggccaggctggtcttgaactcctgacctcgcatcacactcgtatccctcatctttttatagatgaggaaatagactcaggagtgatagagtttgccgtgggtcacattgctagaaagtggtagaacctgggttcattcattgggttatagcctccggtggagggtggacgggggcatgacagccaggcatgctaaggatagcaacccctacttgccctagccctgtggggttccatctcttaggagtgacagatgacagtcaagtgaatggagaatagttcagattgtgacatgttctctagaaggtatcaatggggagactgggaagcagaggttcaaagcataagaaatcaatggtgtgaagagacaggcgaaggtgcaccaggaggggaaacagcaaggtcaaaggcctggaggttgggtagagcctggcatgagcccagacagggtgggtgcaggagagcaaggggaggctggcatcagaggcacttgaagggggggctggtcggtgtgaattttcaagccagattagagctaaggctcccacccatgcatctactgtcctgggccctgtctttggattatctgaaatgggtagcaccattcaagccagatttttaaagctaaggctagtattccagtcctgcagactttcatatgcccacccacgcacccactgtcttgggccatctttggattctctgcactgggtagcactattcactcccacctcccaggcctctcctccaccctgtgtttctgaccccgtcctccattcagattctttcaaggctccaagccagcccgccccgcaggtctcagtctctccagcatctgccccaggccagcctgccgcagacaccactttgggccaccaccctgtgccaaaccctcttcccccaccctgctgtctccaccctcctcctcctctgtgcaaaatcccttaatcacagagtcttgttttctttgcagcccagccaagtctgagagtccaagtctgagagtcaatccccaaacagggcagttcagccccaagggagggagccaggtttttgccaagttgctgatggaccaagaagcccacattccccacttctgcttggatccctctagtgacggggagctcactcacagatattctgtgacccctgttgcactctttagctgggctaatgtccattccttctgttgttgttctctctctctctctctctttttttttgagacggagtctcactctgtcgccagggtggagtgcagtggtgtgatctctgctcactgcaacctctgtctctcgggttcaagcgattctcctgcttcagcctcccgagtagctgggactacaggtgtgcgccaccatgcccagctaatttttgtatttttaggagagacggggtttcactatgttggccaggatggtctcgatctcttgacctcatgatcagcccgccttggcctcccaaagtgctgggattacagccgtgagccacagcacctggcctctctctcctttttattttttttaccttttgggggcttcggttggtggagtagtgttgggcccctgtacggatccttccctcgcctgctccctgcacctgggcctccctctctgggccttggtttcttcttctttggagcctgggcagggaggggtcaaagaggaggagccgggctggtcttcagcactgagctgggtctgtagttgagggatcactgaggaaattctgaccctctctctgcccctggagaacttcctcttagacttcttctttcttctgttcctaatgaaccccctccaacaaaaacccacctcctctccctctccctctcttcttgcttcttcttccctattccttctttggaagtgtcagccaactcccagatcaaggcccttcctggttgggcacctctgacccccgctcctgccctgagccacccctgaaaggtaggaacattctcattgcaagtgaagcagggacctcacccctttctcccactggctccctccctcctctcctgttcttgcattgccaggcctggtgccccatcctcctccttcaggggctctctctggtcttgtctagagtgtctttgggtctgtcctggtccccctaagaccctcagtcctcatcactgtcctctgaagtgaggcgctcctcccaaaaccctcacacccccttctgtgctttgggctcaggtggggtgtgagggacaaggtttgggacattgtggaaggacccagcacagggggtgaggacaggggaaggggactcacctgtgcacagtgtatggggtagggggaggaggggggtctgcagaaggctcacaggcgtctgagctgggggtccagcccacagggtggtgtcgaggtgtgacacagcccagggcaccaggtggtggggggacatgaacaaggcagtgggtctggggccaaagatgaagcttgagagaggctcagggacagagacggtggtggccaacaggatgtcagtgagggatctgcactgtggcgtgtgtgtgtgactgcatgtacattacagcatgtatgtgagtgtgtgtgaccctgtgtgtgattgtgagcgtgtgactgcatgtgcattatggcttgtgagtgtgtgtgaccctgtgtgtgtgtgtgtgtgtgtgtgtacccaggcctggccattcctccagcccctcctccccgaaggcaggagggaggtggccagcgtgggggagggtgccaggcctggaggaggaaatgcctccgggaaatggaaatggcttagaaacagaggctctgtcccatcccatcccatcccggggatcctgaagggaccctaagctccacacccaaacctctccggccaggctgcggggacagggccgacggaaggtcccccgtggaggccaaggccgcgtctccccaggcagaggccccagcctgccggcctcctcccggctgcacatctggccgggccggcaggaggcagtccctgccggagagcagacaaaggcccagccggggcctgcgggaggagggggccggcgcccgggctggtcccccacaaccggccgctaattaaaggccctgagcccgaccgctggagacaccctgagacagacggctgtggcctcactgaccaactcaggggaagtgggcggcgccactcccacacccagacacacaaacacacactggcagcgacacacaccccgcgcaaccagagaccggcgctcgggcactgtagacccacaaaagacgcaggacgcctccaccgcagacacacacgccgacaggctcagtgcacactcacacacccggagacaaacacatggagacacacaaccacacactcccagacatgtgtaaacacacactcatttacacgcgcacacacgggacaagacagagaaacacgcggacacacaaatacacgcacccggggcctacacaaacagaaacacacacatacatacacagacaacccaaggagacagacacacaggcctacacgctgacacatacacactcatttgcatgctcacaccaaaccagagacaaactcacaagtcccacagacctagacacccccccacaccagacacacacacacaggtatttacacactcatcacggtcagagacaaacgcacacatgcttggggacacacacacaaacccagacacacacacactcgcctccagatctgcgcgcacatagcaaacccctatgcgcacacactgtccaaacacacagacacacaagagactcatccccaggcactgacacacacatgtaatgcacaaccactctgcccctacgtggacggacacacacacacacacacacacacagcgcaaacaaacccacggcaaccccgggcgtgatcagtggcgcgcgcacttgcggacctcaggcaccgaccggagtcgcacagcgggatgccctcccccatccagggcaccacagccccacgccctcacagcccgatgcggacacacaaagtcccactgaatcacgcacccccgggccccccgcccgcgccgctacctgcgccgcgcccggggcctccgcgccgtcgccgccgctgtctcgccgccccgcgcgcgcaggaagggagggagcgagcgagcgcggcggcgtggccaggggagggggcgcggggaaggcacttcctgagccgcctgccagggttataaaaaaacccccaaactgcgcgcggccagaaaccccgcccgcctgccgccgcccggcctgggccgcgggctggaccccagccagggacccgggaactcgggccgccccgcccgggaccagcgcccccgccgcgtgggagggggctggggaaccgcggggggcggggaggggacgaagcgggagaaatcgagtggcggcggggagaatgggtgggggaggggagaaagaatcaggtgggggatggggatggaggcagaattgggtgggtgggggttcggggaaagggaggaagagaagggagaggttgggggagggggaagtttgaatgggaaggggtagggggagatggaggcctggaggaaggggctgagtgaggtggggggaggtgggggcctggaggaagggctgagtggggtggggggaagtgggggcctggaggaggggctgagtggggtggggggaggtgggggcctggaggaaggggctgagtggggtggggggaggtggggcccttgaggaggggctgagtggggttgggggaggtggggccctggaggaggggctgagtgggttggggggaggtgggggcctggaggaaggggctgagttgggttgggggccacgggaaggaatggaggggggtaaggaatggggctggaggggggatgggagcatgagatgctggggttggggaggggagagcccacttcctcgccagcctctgcggcatcaacaacagctgttatttattgagggctgggcctggctcaaacaagcatttattgggcgcctcccgtgtgccaggcacggtgcccggggcgggaaataagtcccagctcggccccgccctctccgagctctcaggggggtttgatcggtcctgggcctggccttggtctctgtgccttaactcctttgcggtgacgtaggctcagctggtcccatttcacagatgaggaaactgaggccacagagatggggagagtgaaaattctgttggaaccggagccctcttggtcttggtcactctgggtctcgctccataaaatgaacgaatgcgtgaatgaggaggacctggatggttggggcagggctgggatttgaatcccaggcgcctggtacagtgcctggttccagggaagggcggtgacccccaggcctcacaattgcaggcatttcccaggaacgcccccccccagggagctggccagagccttggccttggctttgtctgagtctgggtttactcatccacacagtgggggtaataacagccttcccagggctggagtagggggtggaggaggggtttcattctgcagcaaagatttgttgttatgtgctgggttccagggacacagctgagaccaggagggcagcttcccaactcggaatttttccttttgaacttggaatgacctgtcattactcacgcatacagcaggtgctgcataaataccagactcctggagttcccaccacactaccttaccccaacctcctgggactccaggctagaccagaggtgcagcccccaccctcctgtttgctccccacactccctccttcccaccagggcctctcgggcccccatttgaggaacgagtctaagtcagccatttctggcctctgttagctgttcttctactacctatggggccctctttctccatcaaagaggtggtggcttcctttctttgctgtagatactaaaggctcccactgttagcctagtgactggtccagccacctgtccctactttttttttttttttttttttgagatggagtcttgctgtgttgcccaggctggagtgtggtggtgtgatcctggctcactgcaacctccgcctcccgggttcaagcaattctccagccccagcctcccgagtagctgggtttacaggcacctgccaccatgctcggctaattgtatttttagtagagatggggttttaccatgttggccaggccagtcttgaactcctgacctcaagtgatccgaccaccttgacctcccaaagtgcttggattacaggcgtgagccactgcacccagcccacctgtccctcctcttaaggatgggtggtttccagaccgcactgggaatttcagggttgctttgagccaggcgctcctaggttctggcactcctaggttctggcactcctagctgtgaaacctctcattataattactctgtgaaactttgacagttctacacccactacttcccaccacagccccagacttcactggggtgggggggtctctttatttcctcaagggcgtgtggccctctagggcctggccgattgtttaggggatgcaccttccccacctgaagcctccagtgagctgtgttgaggcatttgtgatgagtcttgggaaacaaacttttgtgtctttttctttttcctttttttttttttttttttttgagatgcagtctcgctctgttgctcaggctggagtgcaatggcgcgatctcggctgaccacaacctctgcctcctgggttcaagcaattctcctgcctccgcctcccgagtagctgggactacaggcacgtgccaccacgcctggctaatttttgtatttttaggagagatggggtttcactatccttggccaggctggtctcaaactcctgacctcgtgatctgcctgcctcggcctcccaaagtgctgggattacaggtgtgagccaccacacccggcccttttctgtctttttcttttgagacaagatcttgctctgttgcccaggctagagtgaggtggtatgatgatagcacactgcagcctcgaactcctgagctcagatgatccttctgcctcagcttcctgagtatctgggaccacacatgtgagccaccatgcccgattaagttctttttttttttttttttttgagacagagtcttgctctgtcgcccaggctggagtgcagtggcgcgatctcggctcactgcaacttccacctcccggattcaagcgattctcctgcctcagcctcccaagtagctgggattacaggcatgagccacccacgcccggctaatttttgtatttttagtagagatggggctttgccatgttggccaggctggtcttgaactcctggccttaagtgatccgcccacctcagccttctaaagtgttgggattacaggtgtgagccactgtgcctggcctcaaattgtagagacagggtctctctctgttgtccaggttggtcttgaactcctggcctcaagcaatctccctgccccggcttcccaaactgctgggatttacagctgtgagccaacaagtctggcctgacttctgtgtcttgagtgggatggatttgaagctgagtccctatcttagacaacagagggaggcctcttataagaatgaagccagctgggaatgtgggttcactcctgtaatcccagcactttgggaggccaaggcaggtggatcgcttgagctcaggagttcgagaccagcctggacaacatggcaagagcccatctctattaaaaaatacagagaaatagccagggcgtagtggtgcatgcctgtggtcccagctactcgggaggctgaggtgggaggcttgagtccaggaggtggaggttgcagtgagctgagattgggccactgcacttctgcctgggtgatggagtgagactctttctaaaaaaaaagagaaaaaaaaagttaagtaaataaataaaataaaaataaaaaatgaacgaagtcaccagatggagcagatggaggagagtaatggccttggggccatcatcatttgagccctgagcaagctgttcctgaagcccatagatgggctttaatccagtcacactctttattgagcactatattgtatcaggtgctgatccaggtactggggacatggcaggaacaacaatctccatcccacaaaggtcaccgtcctgcctcaaggcctttgcacttgctgttccctgtgcctggaacaccctccctccccaacccccttattccatggccagctctgttttgtctttgcaaatttttttttgtttttgaaacagagtcttgatctgtcacccaggctggagtgcagtggcgtgatctgtggagtgcagtggcacgatctcagctcactgcaacctctgccttctgggttcaagcgattctcctgcctcagcctcttgagtagctgggattacaggcgcatgccaccacgcctggctaatttttgtatttttagtagagatgggattttgccatgttggccaggctggtctcaaactcctgacctcaagtgatctgcctgcctcagcctcccaatgtgctgggattgtaagcgtgagccactgcacctggccatctttcaagttttgactcaaacatcgtttccttagggaggcctgcactgatcccctcacttcaacatgacaccccaacgggcttcctttcccactccctgatttattttactcttagtgtgagtcactactggacctactctatggaatacttatatctgctggcttcctgtgtctcccaccggaatgccggctccgtgagggaaggggtttttgtctgtgtggtccacagcagtatccttggtgcctagcagggtctcacccacagttagtgcccaccgttgaataaataggctcactagtaaataaaagggctctcagaagaggtgacaatgatgttgtggtttgaatgttaagaaagagagcctgttactggaaaaaaaaaaattagctgggcatggtgatgcgtacctgtagtcccagctacttgggaggctgaggcgggaggatcacttgagccagggaattcgaggttgcagtgagctgtgaacatgccgctgtactccagcctgggagacagagtgagaccctgtctcaaaaaaaaaaaaaaaaaaaaaaaaaaaagaggcagtgtgagggtgaaggcgttctaggaggagtgcacagtaactgcaaggttcctgtgcccattctctttttatttaaaccagtctggactgacttaaaagaaaaaattgtttttcagattctttgcaacctttagaacccggagtggttgtgcctagggatgcagtactgcagctctgccacaggagggcgcaatggaactccattgttgcccttggaaagtaggaactaggaaaatagaagtaatgataatcggcagggcgcggtggctcacgcctgtaatctgtaatcccaacattttggaagtccgaggcgagcgaatcacgaggtcgggagtttgagaccagcctgcctaacatggtgaaaccccgtgtctactaaaaatacaaaagttagacgggcgtggtggtgtgcacctgtaatcccagctattcagtaatcccagctactcaggaggctgaagcgagagaatcgattgaacccgggaggcggaggttgcaatgagccaaggtcgtgccactgcactccagcctgggtgacagattgagattccgtctcaaaaaaaaaaaaaaaaaaaaaaaagaagaagcaatgataatggtgataatgatggtgatggcgatggagcaggggctgtgaggtctgtcttaacttcacgacagccttacaaggtaggtgcccattttgcaactgaggaaactaagcccagagaggttgagtaacttgttcaaggtctctcagctaggattggtagaaccagaatagagcaaccaaggtaaaagtcacccataatttgaccatttagggggaaggcaggtgaactttgaggctgaagaccttcccctaggatcgggggaggagggagtcctgggggggccctgggatcattgtgctgagggctgactcttttcccagtgggtagagctcccatctctctctttctctttttttttttttttttttttttttttgagacaaggtgttgtcctgttgcccaggttggagacgagtggcacactcatgactcactgcagcctcaatttcccgggctcaggcaattctcctacctcagcctcccaggaaactgggactacaggcatgctctattttgtctggctatttaaaatttttttttcttgtagagatggggacttgctatgttcaccaggcggtctcaaactcctgggctcatgagatcaccccacctcagtctcccaagtagccgggactacagcatgcgtcaccatgctcgcttaatttaaaaatttttttttgtggagatggggtcttgctgtgttgcccaggctggtcttgaactcctaggctcaagtgatcctcctgccttggtctcccaaagtcctgggatcacaggcataagtcactacacctgacaatggagctcctaacccttagcccatctgctgggcgttttcccccagctctgtggcttggtatcttcttaaatgtggagataaatcacgccttctcaaggtcatttgaaatcaaaattcatctccaagtttcaggggcagggaagacttaggcagttaaagacggggaggaagggagtttcaagctgggggcatggcctgcccaaaatcctggacgtgggagagagggaagggcaggtctcagtttcctatgagattctcttggagtgaatatttatttactcaaacccctcctggcagaggcaacgcaactctcccacccccaccccccttcctcttgaaattcaaaacacacatttggccaggcgcagtggctcacgccggtaattccagcactttgggaggcccaggcaggcggatcacctgaggtcaggagttctagaccagcctggccaacatggtgaaacccctgtctctactaaaaatacacaaattagccgggtgtggtggtgcgcgcctgtaatcccagctaatcgagaggctgtggcaggagaatcgcttgaatccgggaggcagaggttgcagcaagccgagatcgccccgttgcactctagcctgggggacaaggcgagacttcatctcaaaaaaacaaaacaaaaaacacattaatcggccttcatttggatatcacagataatcttatcttgcaagctgagcccagaatgatctgagggctgggtccacccccttcacccctgccccatgcagttttggggcccaaaaggattcggtggctgccaggtcagtgtcctacaacagttgaaagtccccatggccggaagcccccagctatctggaggtttctcaacccacatagtgcctaaatgttccacgtgcaacatacttgcctcaagcccctctagacctaaacctttacacctctgtaaggctggtccctctgtagcgtgatatttcacaactaacgtttcaccctccttcatcttttaatactgaggactgggggttcaaatcccaccttgccgatctttgtccattatttaaacttctccacacctcagttttctcatctggaaaatgggcttaatcaggtggctgtgaggattcaacactattaatggtaaagtgcttattaccatagtgccaggcacaaagtaagtggtagctattatgattagttctggttttgttgttactatttcttattttgttttgatttttaattttttaaagttaaacaattttttctttatctttttttttttcctgagacagagttttgctctgtcacccaggctggagtgcagtggtgcgatctcggctcactgcaacctctgcctcccgggttcaagtgattctcctgcctcagcctcccaggtagctgggattataggcacccgccaccacgtcagactaatttttgtatttttagtagagaagaggtttcaccatattggccaggctggtcttgaactcctgacctcaggtgatccaccagcctcggcctcccaaagtgttaggattacaggcttttttttttttttgagacagagtctcactctgtcgcccaggctggagtccagtggcgccttcgtggctcgctgaaacctccgcttcccaggttcacgccattctcctgcttcagcctcctgagtagctggggctacgggcacctgccaccacgcctggctaattttttttttttgtatttttggtagagacagggtttcactgtgttagccaggctggtcttgatctcctgaactcatgctctgcgcgtctcagcctcccaaagtgctaggattacaggcatgagtcactgcgcacggactgttttttttttttttttttttaaagagacaaggtctttcgctgtcacccaagctgaggtgcagtggcaccatcacagttcactgcagactccaactcctgggtacaattaatcctcctgcctcagcctcttgggtagctgggattacagacattcaccaccacaactggctaatttttaaaaattttttgtagtgacaaggtctcacctacccaggctggtctcaaactcctggcctcaagtgatcctcccacctcagcctcccaaagtgttgggattacaggcaggagccaccgcgcccaatctgtttttggtttgattttttttgtttattaatcttacttgctttttgttttgatttttaaaatgctttgtttattaacatttgtttgtttttgttttgatttttagaaatgtttctgtttattaatctttatttttctttatttggttttaatctttgtttaaatttttttgtttgtttttaaatatttgtggttattattattctactctgttctttccctgagcaagggcactggtctcatatccccaagaagggggtgtccaccttggaaaaagagaggcattttctggacccgaagttccacagtgcctacggggatagggaaggcttccagcaaaaacagctttgagagaatgtttttatttttattttttttgggatggagtctcgttctgtcgcccaggctggagtgcagtcctggtgcaatctcagctttctgcaacctccaccacccaggttcaaacaattctcatgcctcagccttccgagtagctgagattacaggcatgcaccaccatgcctagctaatttttgtatttttagtagagacggtgtttcaccatcttggctgggctggtctcaaactcctgacctcaggtgatctgcccgccttggcctcccaaaatgctggattataggtgtgagccagagagaatcttgtataggaaacaagtaggccgggtgtgctggctcacgcctgtaatcccagcacgttgggagactgaggcgggcggatcactaggtcaggagttcgagaccagcctggccaacgcggtgaaatcccatctctactaaaaatacaaaaattagccgggcatggtggcgtgcctgtagtcccagctacttaggaggctgaggcaggagaatcacttgaacttgggaggtggaggttgtggcaaggcaagatcgtgacactgcactccagcctgggcaacagagccaggctccgtctcaaaaaaaaaaaaaaaaaaaaaaaagaaagaaagaagtatcccagcccagagtctaggaaagagattttctgcgtggggagaggaagaatagagacttagggaggaagtctctggatgggaggctggagtgtgggcatggagaaaacctcaggcaggctggggaccaggtcacaacaggtgggctggacagctctgtgcaggtccctgaggccacatggagggagcagtgctggtgaagtggatagaaagggcggaaacagatcgtggagcgggcggtccctacaggtccctggtcccagggagcagacgtgaggtttgtgtgcctggcccaagtgtgaggtggatgctgtcacagttcgggggtggggggtgccccaaaccgcccaggtgtccaggctgcatgggacaggaggaagatgaggatgaggcaggaggggatgtttgattgggtgcagctgtgttgaggaggtctacgtgctgggtactggggagatgccctgtctctgcgacttcatgcaatgttaatttcttctgatccttctttgatatcctcctgactgcatccggtctcttctgggcatccctggcttcccggtctcagcccgtcccaggagatgctctgatcctgcttcacgtgtttcccgccctggctggctcccatcttggctcctggtgtgattatcccacagacctggcctggggttggcttcagtttcccctctgcagctggggcagatgcggtgcagctcccggcatcccccatgattttcctcgatttccccgcgctttgtgatttcgatgtaaacttcaaacactgctccctttcttgtcctgttctgggtgggcctctgtgccgcccctggtgcacctgctggggtggctgtctttgcaccttctggtcctgttctgccaccttgaccaccccagaggtttcaggggacacttggcagaaggtgactaaaatttcccatccccagctgggtgtggtggctcatgcttgtaatcccagtactttgggaggaggaggcgagaggattgcttgggcccaggagttggaggctgcagtgagctgtgattgcaccattgcattccagactggacaacaagcaagaccctgcctcaaaaaaaaaaaaaaaaaaatcccccacccctgagtgagagaccctggggtgtgacctccttaccccttgcttggggtggaggggtggtgagtgagcggggaggaaggtatcggactgcgggtccaacttcagaaaaacccgagttggcttctggggctccagttcttcatctagaaccagctgtctttggtgctgaggaccagagatgcccaagtggtttgcttgcccgggcatccatctcccagtcctccaaggaagtcatgcctggatggagtagcccttggccaccttttctggggtggcctgggtctggtagaaggggccaagtatttttttttttttgagatggagtctcgctctgtcgcccaggctggtctcaaggtcctgacctcaagcaatcatcttgcctcagcctcccaaaagtgctaggattacagtgagccacaaagtctggcctttgtgagcatttaaaaccctgccccaccagccctccaacaacgaccaggtgaagacgcagagagaaggtggccatctacaagtcaaggagagaggcctcagaggaaaccaaccctactgacaccttgaacttggacctccagcctccagaactgtgagaaaatgaatttctgttgttttagccaggtctgtggtgcattttcttggcagccctagcaagctcatatgcttttttttttttttttttggaaacagagtttcgctcttattgctcaggctggagagcatggtgtgatctcagctcactgcaacctccacctcccgggttcaagcaattctcctgcctcagcctcccaagcagctgagattacaggcacctgccatcacgcctggctaatttttgtattttagtagagatagggtttcaccatattggtcaggctggtcttgaactcctgacctcaggcgatccacccgcctcggcctcccaaaatgctggggattacagacgtgagccaccatgcctggctgctcatacatgttttaagtttgaatgatattccattgtacatgtagaccatgatttgccccctcttgcttccatgccagtgtcccctggagccgtctccctgctgtctcctgctgtatctgggctgggctgggacctagtctcagctgcaactgtctcccctgaacccccccgtctccaacaggctctgacctccagacccacccccccttccacagtccctaagccttttcctatctccacttttcagccacagaatctgagacccagattggaagctccttgtggtgagggttagattaaatatgtaattcttataagagacttagaatggtgcctggcacagaagctattattactattattattattttgtgtgtgtgtgtgtgtgtgtgtgtgtgtgtgtgtgtgtgtgacagagtctctctctgtctcccaggctggagtgcaattatatgatcttggctcactgcaacctctgtctcccgggttcaagcaattctcccgcctcagcctctcatgtaactgggatcacaggtgcccgccaccgtgcccagctaatttttgttatttttagtagagactgggtttcaccattttggccaggctggttttgaactgcagacctgtggtgatccacccgcctcagcctctcaaagtgctgagattacaggcaggagccaccgtgcctggccttttatttactatttttttttgagacagggtcccactctgccacccagaggctggagtgcagaggtgccatcataactcactgcaacctcagactcctgggctcaagtggtcctccaacctcagcctcctgagtagctgagattacaggtgcccaccaccatgcccagctaatttttgcatttttattagagatagggtttcaccttttggccaggctggtctcgagctcctgacctcaggtgatccacctgcctccgcctcccaaagtgttgggattacaggtgtgagccaccatgcccggccactctgatattattaattagctgattgattcaacaaacatttattgggcccctactctgtgccttgttcaggcagaagaagagaacaacatctccactctcatagcactagaaaaagacaaaagaaccaataaacgaatacacacagagtagattctctttacttgtggtagttctgttctttaatgtcgccatggacactgaattagggaacactaaactgttgttcctggggaaataaaaggttaggttcctatgactctctggtcacagcattttaatcaactgatcaatacataaccttggtttatatgtgttatttaatttaatttaattttattgagacagagtctcgctctgttgcccaggctagagtgcagtggcaggatcttggctcactgcaacctctgcctcccaggctcaagtgattctcatgcctcagccaccagaatagctgggaccacaggtgcgcaccaccatgtctggctaatttttgtatttttagtagacatggcatttcgccatgttggccaggctggtcttgaactcctggcctcaagtgatctgcccaccttggcctcccaaagtgctgggattacaggcgtgtgagccattgcacccggccctatatgtgtttatttattttttattttttgagatggagtttcgctcttgttacccaggctggagtgcaatggtgcaatctcggctcactgcaacctctgcctcccgggttcaagtgattcttctgcctcagcctcccgagtagctgggattacaggcacccgccatcatgcccgactaattttgtatttttagtagagacagggtttctccgtgttggtcaggctggtctcaaactcccgacctcgggtgatctgcctgcctcggcctcccaaagtgctgggattacaggcatgagccactgcacccggcctatatgtgtttatttttaaagacaccttgttaaatatatatagttgcttcattcacattgaactcatggctaacagcaagaccactcgcgcctgaatgaagcttctctaacacatggattttctctgtgagattcatcacagtcttctgtatactgtggtttgaatgtgtccccacaaaagacatgtgttggaaactcagtccccagtgcaacagtgttgggaagtggggcctaaggggaggtgtttaggtgatgaaggttccaccctcatgaatagattaggaacaatttgaaaaggggttgagtgctgggtacagtggttaatgcctgtaactccagcactttgggaggctgaggcaggaggatcctttgaggccagaggtttgagaccggcctgggcaacatagcaagaccctgtctctacaaaaaaaaaaaaattagctgggtgtggtggcatgagtctgtagtcccagctacttgggaggctgaggcaggaggatcacctgagcccagggaggttgaggctgcagggagctgttattataccactgcattccagcctgggcaatagaggaaaactctatctcaaaaaaaggggaggattaggctgggtgcggtggctcatgcctgtaatcccagcactttgggaggccgaggtgagtggatcacctgaggttgggagttcgagaccagcctgaccaacatggaggaaactcgtctctaccaaaaaaatacaaaattagctgagtgtggtcacgcaggcctgtaatcccagctacttgggaggctgaggcaagagaatcgcttgaacccgggaggtgggggttgcagtgagttgacatcgcgccattgcactccagcctgggcaacaagagtgaaactctgcctcaaaaaaaaaaaaaaaaaaaaaaaaaaaaagaggaggattgaggctatgagcctgatttttcttgttctctcacactctctctttgcccttccaacacatgaattttggggcacacgttcacaccatagcaccatctaatggagctgtggtaaggattagattaaatacatgattctggccaggcgaggtggctcatgcttgtcatcccagtgctttgggaggctgaggcaggagggttgcttggggccaggagtttgagatcagcctgggcaacatagcgaggccccgtctctacaaaaaacagaaaaagtagccaggcagggtggcacatgcctgtagtcccagctacttgggaggctgagatgggaggatcactggagccagggaggtcaaggctgcagtgagccaagattttgccactgcactccagcctggaggacacagtgagaccctgtctctgaaacaaaacaaaacaaaacaaaaccaaatggaaaagtgtgatttttctttttatttcttttattttttaatttttgagacagagtttttgttctgttgccccagctggggtgcaatggagtgatctcggctcactgcaccctctgcctcctgggttcaagagattctcctgcctcagcctctcgagtagctgggattacaagcatccaccatcatgcctggctaatatttgtatttttagtagagacgaggttttaccatgttggccaggctggtctcgaactcttttttttttttttttttttttttttttttttgagacggggtcttgctctgtcgcccaggctggagtgcagcggcgcgatctcggctcactgcaagctccgcctcccgggttcacgccattctcctgcctcagctcccgagtagctgggactacaggtgcccgccaccacgccggctaattttttttatttttagtagagacgggatttcactgtgttaaccaggatggtctcgatctcctgaccttgtgatctgcccgcctcggcctcccaaagtgctgggattgcaggcatgagccacccgactggtctggaaaagtgtaatttttctaagaaacttagccatgggatgatgggacaagaaggcccttgccaggtgcaggccccttgaccttggacatcccagcctccaactgtaagaaataaatctctgttcttcataaactacccagtctatggaattctgtgatggcagcacaaagtgaaataagacattgtgcgcagggacacaggactccacaccagcattgtgcttggagccaatgtgaacagcaacatcaccaaaaaaaaaaaaaaaaagcacaaaaatgaaaaaaaaaaacaaccccaaaaacccaaaaaaacccagcaccactcgatagactccaaaagggcacttgtttgtatgatgagagctgagacaggaaggcagagtgtcgccttgtgtgacctcagctggggacaggtgtgtagcgccactcaaagtttttgctgctccatctgcacatgactgagaatggctttgagaaccccaccagtaatgatttgggggttaaatacattttagcaagcaggccaatttgttttgttttgtttttgtttttttgatgctttgtcacccagggttggagtgcagtggtgtgatctcggctcactgcaatctccgcctcccgggttcaagcgattctcttgtctcagcctcccaagcagctaggattacaggcacctgccaccacgcccagctaatttttgcatttttagtagagacggggtttcaccatgttggctaggctggtcttcgactcctgacctcgggtgatccgcctgccttggccttccaaattgctggcattacaagcatgagccaccacacccggccaagcaggccaatttgtgatgccagaatccatgaataatgagtatcaactgtatcatattacaggtggaagtgaatgctgtgcgggaaataaaaggctgggttgaaaacagactcacgcctttaatcccattgctttgggaggctgaagtgggaggatcatttgaggctaggggtttgagaccagcccaggcaacatagcaagaccatgtttctgccaaaagaatgttttttagaagaatagctgggtgtggtggcatgtgtctgtagtcccatctacttgggaggctgaggcaggagaatcgcttgagtccaggagtttgaggctgcagtgagctatgattgcaccactgtactccagcctgggtgacagagcaagaccctgtctctaaaaagataaaaataggcctggtgcggtggctcacgcctgtaatcccagcactttgggaggccgaggtgggcagatcacgaggtcaggagatcgagaccatcctggctaacatggtgaaaccccgtctctactaaaaatacacacacacacacacaaatagccggacgcggtggccgggcacctgtagtcccagctactctggaggctgaggcaggagaatggcatgaacctgggaggcggagcttgcagttagcggagattgtgccactgcactccagcctgggggacagagtgagactctgtctcaaaaaaaaaaaaaaaaaaaaaaagataaaaacaggctggacgcggtggctcacgcctgtaatcccagcactttgggaggccgaggctggtggatcacctgaggtcaggggttggagaccagcctggtcaatatggcaaaacctgtctctactaaaaatacaaaaattagctgggcatggtggcacgcacctgtaatcccagctacttgggaggttgaaggagaattgctgtaaccaggaggcagagattgcagtgagccgagatggcagcactgcactccagcctggtcgacagagcgagattctatctcaaaaaaagagagaaagaaaaaaaggataaaaatacataaaatgaaagaaaagaaaacagggagacaaggggagagagtgtatgttagttacctaggactgctataacaaaatactagaaactggtgatttttgacaatagaactttattgtacagtttgggagaccaggagtccaaaatcaaggtgtcgacagggccatgctccttctgaaggacccttccttgcttctccctggcttctggtggtggccagctatccttggcttgcagctgcatcactccaatctcagcttccgtcgtgtagccttctttgcgtgtgtctgcctctgtttctgaatttcctccttcttcttttttttttcctttttgagatggagtttcactcttgtcacccagcctggagtgcaatggtgtaacctcggcccactgcaacctctgcctcctgagttggagtgattctcctgcttcagcctcctgagcagctgggattacaggtgcccacaactctgcctggctaatttttttgtatttttagtagagacggggtttcatcatgttggccaggctggccttgaactcctgacctcagctgatctgcccacctcagcctcccaaagtgctgtgattacacaggcatgagccaccaagcctgccatttccctcttttttttttttttgagatggagtttcgctcttgttgcccaggctggagtgcaacggtgcaatctgggctcactgcaaccactgcctcccaggttcaagtgattctcctgcctcagctcccaagtagttgggattacaggcacccgccaccacgtctggctaattttgtatttttagtagagacggggtttctccatgttggtcaggctggtcttgaactcctgacctcaggcgatctgcccaccttggcctcccaaagtgctggaattacaggcgtgagccactatgcctggccattttcgtcttcttataaggacacgagtcacattggattaggacccaccataacgcaggaggacctcatcttaagttgatttcatctgcaaagactgtatttccaaataaagtctcattcacaagttccagatgggcatgaatttaggggaggggacactattcaacccagtccagggggctcttttagagagggagttcatggaagcatggaaggcttcttggaggaggcaatatatgatcagaggcctgattgaagtcaaggggatctggggcaggagcattctaagtggagggaacaacgtgtgcaaaggtcttggggttgggctgtgcctgttttgttatctgttctggcatcataacagggtctgtgtgtacagctggaaggaagtgagttgatgtgggagaggtgaggacagggaggtgacagggacaggtcatgaagggccttgtgggctgcaggaaggacttgggcttttaccctgaggaggtgggagccatggaggactgtggacagaggaaggatgtgagaccccagagaaggacaagacagcacaagggcaggctagggtccgggtttggtatctcacagaaaccccacaatctcctggtgttggacactttatctcactcagataaaaatacataaaatgaaaggaaagataaaaataaataaaaagaaagaaaggataggccaggcacggtggcttacgcctataatcccagcactttgggaggccgagtcgggtggatcacctgaggtcaagagttagagaccagcctgaccaacatggtaaaaccccgtctctactaaaaatacaaaattagccaagtgtggtggcacatgcctgtaatcccagctacttgggaggctgagacaggaaaattgcttgaacccaggaggcggaggttgcagtgagccgagactgtgccattgcactccagcctgggcaacaagagtgaaactccataaaaaaaaaacaaagaaagaaatgataaaaataaattaaagaaaagaaaacagggagagaaagggagagagtgtatgttagttacctaggactgctataacaaaatactacaaacttccagatgaggtctggtgagtttaactccccaggatcacacaattgctcagtggtagatgcacagttcaaatccacactggtgtgtggcatcaggaataacctatgagagtgttcatagtgtccatgaacattgtattcactagcttcaaactcctgtcactgatagttatttatttatttttgagttggagtctcacactgtcacccgggctggagtgcaacagcatgatctctgctcaccgcaacctctgcctcttaggttcaagtgattctcttgcctcagcctcctgagtagctgggattataggcacgtgccaccgcgcctggctaattttttgtctttttagtacagacggggttttactacgttggccaggttggtcttgaactcctgagcttgtgattcacctgcccgggcctcccaaagatctgggattacaggcgtgagccaccgcacccagcctatcactgatatttatgatgtcacctccatggcactttgttggttgacaatacctgggatatctccattatagccctgttcgtgggcacagagttctctgccatggctggggactaggaagtgggaaagagctctaggggaacctgagggcttgggtggaagactggagagccaggaggagcaaggagcaggaagcaaggtggtaatgatgagaggctgagtcttccttcccatgccttgggtgggacatttctggtctctgacacaggagggcatgcagacctgggttaggctcctctctcccccacacaggtccggttggatcagcttattccccctgcagcttaactacctccatctcccttctgggatctcatgattgcctttaattggggccttggatgcccgggtcgtgttgcatggaactgcggccaagtgaggggattaagcaaagctgactaggatcgtttcatgcagatcttttcagagcctttaatagacacctgtgctttgcacagctttctcaaacttacttaactcctttgatattttttcctctgtagcattttggggtaccaggggtttctggaagggatacaggaatcattgctttaactcaaagagggtgcctgaatggtggaatttcaggcagggacttctggctaagcatcaaaggtttcctcctgctcctccctctctgctttcccttcccaggacccgggcactgagaacaaggctggcaccccacagctctctcaggggtggcccagtggggttgcaaattctaggcaggccaaattaggagctcacagggaggctggagggggtcagcccaggcagggctgggggctgggcttgggatgaacagggggactgaacagagaggcagcattctgaactggagttctgtgcctgtcccttgatctctggggggtctggaggcaggcgtgtcttctgggaaggcagcggagtcccctgggacaaagcccagggattagctcagtagacaaacatctgagtcttggccccctcttcccccgagtccagggtcacagtgggaggccgcagattggccctgttcttctgaaagtaaacaggcagtgctggcctggcttcccctacatccagccgccaggccttcgtgtccagcccctttgtgcggcggctccagcctctcagcctcctggcctttcactttctgcctcctccgtctacacccgctgacctcttgaagcgtctctagtgatggggaccctgggggcttggtcactccagtcctcgcttttgtgtgtgtgtgtgtgtgtgtgtgtgtgtgtgtgtgttttgtttgtttgtttttttgagatggggtttcgctcttgttgcccaggctgcaatgcagtggctcgatctcagctcactgcaacctctgcctcccgggttcaagcaattctttcgtctcagcctctccagtactgggattacaggtgcctgccgccacactcggctaatttttgtacttttagtagagatggggttgcaccatgttggtcaggctggtctcgaactcctgacctcaggtgatccacctgccttggcctcccaaagtgctgggattacaggcgtgagccaccgcgcccggccgcccttgtgttttattactgggatgctctagaggagccagagggaggcaggttcagggctgactgccccgccatacagtgtgtgtgtgtgtgtgtgtgtgtgtgtgtcagggggttatttttaccgctgttgtgtcagagacttgtgaaccagagtgactccatcttgaataggggctgggtaaaatgagcctgagacttactgggctgcactcccagacagttaaggcattctaagccacaggatgagaggggagtttggcacaagatacaggtcataaagaccttgctgataaaactggttgcagtaaagaagccggcccaaacccatcaagaccaagatgatgacatgagtgacctctgattgtcctcactgctacactcccaccagccccctgacggtttacagatgccatggcaacatcaggaagttaccctctatgctctaaaaacgggaggtatgaataatccaccccttgtttagcatatcatcaagaaataaccataaaaatgggcaaccagcagctcttgtctgtggagtagccattcttttattcctttttttttttttttgagacggaatctcgctctgtcccccaggctggagtgcagtggcacgatcttggctcactgcaacctccgcctcccaggttcaagcaattcttcttcctcagcctcctgagtagctgggattacaggcacacaccaccatgcccagctaatttttgtatttttagtagagacagggtttcaccatgttgtccaggctggtctcaaactcttgacctcaggtgatccgcctgcctcagcctcccaaagtgctgggattacaggcatgaaccactgcacctgcctttttttttttttttttgagacagagccttgctctgtcactcaggctggagtgcagtggtgtaatcttggcttactgcaccctctgcctcctgggttcaagggattctcctgcctcagcctcctgactgattgagattacagatgtgcaccaccatgcccagctaattttttgtattttcagtcgagacggggttttaccgtgttggccagactggtcttggattcctgacctaaggcgatgcacccacctcggcctcccaaagtgctgggattataggtggaagccaacgcgcccggcctcctttacttccttaataagcttgctttcactttactccgtggactctccctgaaatctttcttgcgggggacctaagaaccctcttttggggtctggatcgggacccttttccagtaaaagttggtgttattggcagtgaggtagggaagctgcggctaagctgaggctgcacagggaaggtgtcttgaccttgaacttgacaccttgaccttggacccttgcctaggctctgagggccagctcctttccctctctctaccttcccccacctctggctcttggaagtgcacctgcagctgctgtgggaggagccctccagccgccctgaggatggtttcctgcctcccttcctgccccctctgaagaccaacttagctatgcccaactcagctcttgtcctgggacaaggccccctgcctcctggtcaagggagcagggtcctggggagggagagacagatgtcgaggctggacaggaggttgtggaaggggaggaagtggatttgggagtatagctttctttcttactcagttatcattagtataacttttctcccttccttccttccttccttccttccttccttccttccttccttccttccttccttccttccttccttccctcccttctttccttctctctctctcttttttgctttcttgcttgctttcttgtttccttttttttttgagatagagtcttgctctgtcacccaggctgcagtacggtggcgccatctcggctcattgcaacctccacctgccaggttcaagcgattctcctgcctcagcctcccaagtagctgggactacaggtgtgtgctatcatgcccagctgatttttgtatctttggtagagaaggggtttcaccatgttggccaggctggtcttgaacccctggcttcaagtgatccacccccttggtctcccaaagtgttgggattacaggcgtgagccaccctgcctggcctcttttttttttctttttgagacagggtttcactctgttgcccaggctggattgcagtggtgcaatccagccttgaatgtctgggctcaaatgattctcccacatcagcctcctgagtagctggaactatcggcgcatgccgtgacacccagctaatttttattttttgtagagatgggatctctctcaaattcctggcctcaagtaatcctcttgcctcagcctaccaaaatgctgggccttattattgtaatgttttttcctttcatttaagtaaaaattaaagtgtaatttactggccaggtgtggtggcacaggcctatagtcccagcactttgggaggctgaggcgggcggatcgcttgagctcaggcattggagatcagtctgggcaacacagtgagaccttgtctctacaaaaaacaaaacagaaaattagctgggcatagtggtgtgcattcgtagttccagctaattgggaggctaaggtgggaggatcacttgaatccgggaagtcgaggctgcatcaagccaagatggccccactgcactttagccaagaccctatcacaaacaaacaaacaaacaaacaaacaaacaaacaaacaaaaaaacaaaaaaaccagtgtaatttactgacagtgaaacccatacatattagtatacgattctgtgatatttgacaaaccacacaaccctataaccacaacctcaatagaaatacagaataccggccaggcctggtggctcacacttgtaatcctagcactttgggaggctgaggcgggtggatcacttgaggtcaggagttcaagaccagcctggccaacatagtgactctctgtctctactaaaaatacaaaaattagccgggcatggtggtgggcacctgtaatcccagctactcaggaggctgaggcaggagaatcgcttgaacctgggaggcggaggttgcagtgagccgagatcataccactgcacctcagcctgggcaacagagcaagactccatctcaaaaaaaaaaaaattaaaaaaaaaaaaaaagaaatacagaatacctttttccctcccaattcctgcaattcctgcgtgcccctctggagtcaatttctctccctcagtcccagcccctggcccctgctgacttcctctctgttgctatatttctgccttttcccaggatattatgtcaatggaatcgtaccataggcagcttttggcgcatacttcttccaggcagcagaatgcatttgaggcttattcacgttgttgggtgtagcattttttgtttcttttactgttgaggagtccctggtatggatgtgtcaccatgcatccattcatttgttgacagacacgtgagttgtttccagttttggtgacgaatgcccaaattcataggcgatgataaataatgtgccagacgttgatgtgcaagttttggtgtgagggtaagtttccatttctctacggtgaatacctatgagtccttattctctctctctgtctctgactttctctttctctctttatttatttgtttatttatttttatttattagacagggtcttgctctgtcacccaaactggagtgcaatggtgcagtcttggctcattgccacctctgcctcctgggctcaagctattttcctgtctcagcctccagagtagctggaattacaggtgcgcaccaccacacccagctgatttttgtatttttagtagagagggggtttcaccgtattgcccaggctggtgttgaactcctggcctcaagtgttctacccggctcatcctcccaaagtactggtattacaggcatgagccaccacacccagccaaaaccagccttttaaaaaaattttattttcggctgggcgcggtggctcatgcctgtaatctcagcactttgggaggccgaggcgggtgaatcacggggtcaggagttcgagaccagcctgaccaacatggtgaaaccccgtctctactaaaaatacaaaaattaactgggcatggtggcacacgcctgtagtcccagctacttgggaggctgaggcaggagaaatgcttgaacctgggaggcggaggttgcagtgagccgagattgcgccattgcactccagcctgggcaacacagcgagactccatctttttttttttttttttgaaacagagtcttgctctgtcgcccaggctggagttcaatggcgccatctcggctcaccgcaacctctgcctcctgggttcaagcaattctcctcccttagcctcctgagtagctaggattacaggcatgcaccatcatgcccagctatgtttttttttttaatttttatttttagtagagacggggtttcaccatgttggtgaggctggccttgaactcccgacctcaggtgatcagcttgccttggcctcccaaagtgctgggattacaggcgtgagccaccatgcttggctaatttttgtatttttaatagaggtgaggtttcacccttttgcccaggctggcctcgaactcctgaccacaagtgatccgcccaccttggcctcccaaagttttgggattacaggcattagccattgcgcctggcctatatggaggcttttgtatggagagacaggacactggtcccctggatactggagggggacagtcagggatagagctggggccaaggggaagatatagaagtgcgaatcaggtgaggtataggacagggtgcctggaggggaggccagaatcttcattctaaccaaatccttgcctagtttttaaaaaaatgggcaaggctgaatgtggtggctcatacctgtagtcccagtactttaagaggccaaggcagaaggatcacttgagcccaggagttcgaggctgcagtgagctaggactgtgcactccagccgggtgtgatgacgcacacatataatctcagctctcagaaggctgaagcaggagagtcacttgaatccaggaggcagagattgtagtgagctgagatcacaccactgcactccagcctgggcaatagaaaaaaaaccaaaaccaaaccaaaacaaaaccttaaacacaaagttaccatagaactcagcaactcctgaggtcaggagttcgagaccagcctgaccaacatggtgaagccccttctctactaaaaatacaaaaattagcagggaatggcggtgcatacttgtagtcccagctacttgggaggctgaggcaggagaatagcttgaactggggaggtggaggttgcagtgacccgagattgcaccactgctctccagcctaggcgacagagtgagactccatctcaaaaaaaaaaaaggccgagtgcagtggctcacgcctgtaattccagcactttgggaggctgaggcatgtggatcacctgaggtcaggagtttgagaccagcctgaccaacatagtgaaactccatctctactaaaatacaaaaaattagccaggcatggtggcagatgcctgtaatctcagctacttgggaggctgaggcaggagaatcacctgaaccagggaggcggagattgcagtgagctgagattgcgccactgtactacagcctgggcgacaagagcaagactaaagatggtctcaaaaaaaaaaaaaaaaaaaaaagaaaagaacagaaaaagaaaaacaaaaagcctccacatagtccccttgctcttgtagaacagagaaggacttcatagacctttccccaacacaggttagtgccagcatgaccttgccaggccaccttaatagagcaaagatcagtagatgctatgggaagtcaaattttctcaacattagaaactctttccaacacacagaaaaatggaaagaattgggcacaggcacactcacccctagattctacaacgaactcattgccattccgcggtaaacgctaagccaggcgtcacacgctatgctgtgtgatgctagaagtgcgcacacttatcctgttggtggtggaatttacacgtgcgttcatgagtgtgcacgtgcgttagccgctgtgtgcatttgtgggcgtgcaaagggatgtgcctgggggaaaacctcacacagtggttaggaagcctgtgcagttgaactgtgggggctcccgtcttgcttctgccacttaaggactgtggggccttgggcgaattgcccaacttctctcctgcccgtttcctctttcagtgtggattcattcattcaacaaatatttacggaacgaacacctcctgcgtgccaggctccattccaagcactgggggttgcagcggcgaacaaaacagacccaaatgcctgccctggtgggccaggaaggcagaaataaagatgaagagttggtcaagtctgcagtatgtcacagggtggtagggctgcgtttgtgtacatggggaagaggctgcagctttagaggtggggggacctcccggggaaggtgaggagagtgaggtgcttctagggggatggaggggaggggagagtctttctggcagagggcaaagcaagtgcaaaggccctgaagcaggaatttactttgctgtttttttttttttttttgagatggaatctcgctctgttgcccagactggagtgcagtggcacaatcttggatcaccgcaacctctgcctcccgggttcaagggatcctcctgcctcagcctccgagtagctgggattacaggcgcacaccaccatgcccagctaattttttgtatttgtaatagagacaggctttcaccacattggccaggctggtctcaaactcctggcctcaagtgatctgcccgactcggcctcccaaagtggtgggattgcaggtgtcagccactgagcccggcctacttggctgtttaaggaacagtgaggaggtccatgtggttggagcagagtgatagaaggggtgagaggaaggagggcaaaggcagagaggtgacagtgggtgttgtggggaaggagagcttgcaagatctcaagagttacaggcatggcaggccaggcatggcggctcacacctgtaaccccagcactttgggaggctgaggcaggaggatcatttgagcctggaagtttgcgaccagcctgggcaacatagcaagacccctgcctctacaaaaacaaaacaaaacaaaacaaaacgcaacaattagccaagtatggtggcatgtgcctgtagtcccagctactcaggaggcaggaagatcgcttgagcccaggagtttgaggctgtagtgagctatgatcgcaccacagcaatacagcctgggtcacagagccagaccatctcttaagaaaattaaaaaaaaaaaaaaaagatttgcagaaagtactcaagcttttaccctgggatgtgttgagggtgtcctctctggctgctgggtggatgataatagcacctacctgaaggagttgttggaaggacgacatgaattaatatgtgtaaagtgataggccagtgtctggcatataccacacatggggtaaggattagtttatttttatatgcggtaggcgtgtgtgtgttgggtgtctctgggcggcagctgagccaggtggccattagtgagtttgttgttgtgaaagaatctctctaacactatttaaaaaaccctgctgggtgtttaaaagccctactggggttgccatgttttggctgggtcccggctcttttgtataacagatgttacccagatgtcagctggggtcaatagagcctcagagatttggcgtctgcctctctcccacgacctgtgggaagcctggtgccctctgtgagatgcttgtgaattcccagggcctctgttctcatggttgcgtcttggcctgagttcctgcccgctgaactcttgccctcacccaccttcctggggccagtgctttgcgggtgaaccggtcctgtgttcttgattttcccccagatcactcttgcacatggactgcctgcaggttgcctctcaagatactgtgctctcccagtctggccaatgtagcaagaacctattgttcctgctgtagttttttttttttttttttttaccattgcttgagcttctgcataagatgttgcttgacaaagcattccaccaccaacaggaaaagtttacacacttgttgcataacacagcatagagcgtgatgaccggcttggagtttaccaggctgtcctgtgaaggggaagttcacttaggacacccggggccaatggctgtgagcagcagaaggtgcctttgatgtcaagctgtcttgaacgctgctgctcccgggtgggtaagagctggcacagtccagaaaaattgaggcggcgacacgatgagagacagcaacccatccccagacaaacctcaagagaccagaagcagccacattgcaccagacttctggaaaattaggcaagcgttggcaacagaatatgttgtggactcttctcacagtttctgtaatcattaactgctttctcagggtgtggatattcaaggaccagaggtcaaagttacagcaacagcaccttgcaaggggcaggggtgaggagaacctccttgggcaggtcgtgctgtatgggataagcccagaactggtttagttctgagacgagggtgcagatagtattggaaagatgcatatcactcaagcctggaagaagaccagggttacacttaaccttgactgcagttcaatgcctcggtaatatggactgaattgtaactaagactgttctctgcaaggtttgcttggtttctgcatctttgtaattgtagcatttggtgttcacttgaaggatgggtcttcaagagcatattctccaatgtttctttctcacggctcaccacaacctcgacctcccaggctcaagtgatcctcacacctcagcctcccgcgtagctgggactactggcatgcaccaccacacctgactaatgtttgttttttttttgtagagatggggtctccttatgttgctcaggctggtcttgaactcccaggctcaagcaatccgctcacctcagcctccaaaagtgctgagatcacaggcgtgagccatcatgcctggcctctccagtgtttcttaaatgtttctggaccacatacttgtttaggaattcacccaaatctaaagaccactgctggcccattgccaaaattcctcccaccccaaatatatttacccaaaagattttgcagatagttgtatggtattgtggtgctgcaaaattttatccacagagcccattccaattctgggttcataacctctgatctagcttggttctcttattttacacatggggaaactgagtcaaaagagcacaaagacttgctcagggttatgaagacacttcatgacagcccttggtgtcagagtaagaactggatgtgagttcccttaccagctgagatgtcttctctctgtgcctcagtttccctatctgcaaagccaggataataatagcacttacttggtagggatgctatgaggatcacatgacacatatgtgaagcatttagaaccaatgccttaataaatgatagctttttttttttttagagagagcttctcactctgttgcccaggctgctggagtgcagtggcacaatcacacctcattgcagcctcaaactcccaggctcaagggatccttccatctcagtttcctaagtagctgggaccacagatgtgcaccatcatgcccagctagtacttttttttacattttatgttttttgtagagacagggtcttgctatgttggccaggctgatcttgaactcttgggctcaagtgatcttcctgccttagcctcccaaagtgctgggattacaagtgtgaagccaccatgcctggcctatggctctaatttttatcaccgttctctttttttttttttttaagtgtagacccgagttgattctttagcctgtagctaagtcaaagtttgaaccaaagaactcctgccacctagtggttctgtgatgaataaagtagggtttgcagcactgaaacatggtgatcacatgcatgtctttgcctgtgtggttattgttggggaattagtggctatgtctctttccaaagagagtgtgtttacacattgtatctgttagcctttgctgtgtaacaaactaccctatggattgcaaccatagccacttattaacccttgattctgtgggttggcaacttggttgagtttagccaggcggttcttctgtcggtcttgcttgggcccatgcatgtggctacagttagctggtgggttggctggggctgactaccttggattgcttcactcatgagtccattagcaggctgtttgctggggtgccttggttctcctccacgtggcctctccggtgggcttgctcaagctcattcccatggtggttgcagagttgctaggaaaagcagagaatatagccctaatgcgcaagaacttccccttgtgtcatgtttggtaatgtctgattggctaaaacaagccatatggtcaaacccagactcaggaagtaaggaaacagaatctatctcttgactggaggaaatgacaaatattgtaaatattggggctgttcttcccactccccaatctgtcacacatgtttgctggcgagtggttgggtgttgaatcgtcagtttcaacttaaaggattttgactcttttttttttttttgagacagggtatctccctgtcacccaggctggagtgcagtggtgtgatcatagtttactgcatcctcaacctcctaggctcaagctctccccccacctcagcctcttgagtagttggacccataggcatgcaccaccacacctggctaatttgaaaattttttgaagaaatggggtctccctctgttgctcaggctggtctcaaactcctgggctcaagtgaagttcctgcatcagcctcccaaagtgctgggatcacaggcgtgagccatcacacccagctaaggattttgactctaaagatatgttttcacatgttttcacttctcaaaagaagagagtttataagtagagaccataacttccaggctagcccaccagtcttatgatggaaaataacttcctctctatgggatgtgatggttaattttatgtgtcaacttgactgggccataagacacccagatatctgggttaaacattatttctgagtgtatctgggagggtgtttctgggagagattagcatttgcattggtggactgagaaaagcagatggtgctccccaatgtgggcagacctcatccaatctgttgagggccagactagaacaaaaaggcagagaggaaggttgaattctgtctgtgtcaaactgtggaatagggacattgatcttctacccctggtgctcctggctctcaggccttcagacctggcttggaatctgcatcattggctctcaggctctccaacctttgaacaataccatgaatcttcctgggtcttcagcttgcagaaagcagatcataggatgtctcagcctccataatcagatgagccctgtaattatataatccttataataaatctcaccctggatctctctatctctttctgttgctgtcgctctctctccacctttctgatcagctattgattttgtttcttgggagaactctgactaattcacaggacatttccatttcttcgtttattgtggggttctctctctcagccatttgcattcccccaacacctccttccctcattatggattgaattgttccaccccaaatgcacgtattgaagccccaaaccccagtgtgactgaatttggagatagggcattgattgattgattgattgattaattgagatggagtcctgctctgttacccaggcaggagtgcagtggtatggtcttggctcactgcagcctccacctcctgggttcagatgactctcatgcctcagcctaccaagtagctgggattacaggcgattgctaccatgcccaactaatttttgtacttttagtagagacagggtttcactatgttggccaggctggtctccaactcctgacctcaagtgatccacatgcctcagtctccgaaattgctgggattacaggcatgagccaccgtagctggtaatagggtcaacttgtacatgtatttcaactcatttccagcggaggtcagtcaagaatctcattctattaaagtcagtctatgctatgactttgaagtctgttgcccaggctgattgcagtggagaccatggctcactgcagcctcaacctcccatactcaagagatccttctgcctcagcctcctgagtagctgggaacacaagtgtatgctaccatgcctggctattaaaagaattttttttttgtagagatgggggtcttaccgtgttgcccaggctggtcttgaactcctgggctcaagcaatccttctgcctcggcctcctaaagtgctgagattacactcttaaaccaccatgtccagccagatgacttttttttttttgactgagttttcgctcttgttgcccaggctggagtgcaatggcatgatctcggcttaccacaacctccgcttccctggttcagaggattctcctgcctcagcctcccagtagctgacattacaggcaaacgcctccattcctggataattttgtatttttagtagagatggggtttcgccatgttggtcaggctggtctcgaactcctgacctcaggtgatcccaccctccccccatcccccacctcagcctcccaaagtgctgggattacaggcataagccaccgcacctgtccagctttccattttcttacttatcaattatctcactgtatgagatacaatttccttaattctgttttattttaagagacagggtcttgtctgtcgcccaggctggagtgcagtggtgcaatcatagctcactgcagcctcaaactcctgggctcaagtgatcctcccacctcagcctcctgagtagctgggacctcatgtttgcaccaccacacctgggtgatttttttttttttttttttaagatatgggggtctagccatgttgcccaggctggtcttcaactcctggccataagctaatcctcctgcctaggcctcccaaagtgctgggattacaggcatgagccacagttcctggctcctacattactttttctgatcatgttgtccccagcctcagctgtgattggctccaaaccccagctcccagccaacacctcatcttttggttacagtgattggctcaggagtgagtgtgtaacacacccagagccaatgagaggcaaggacatttgctggggattctgggaaagtacacctccctttttctttcttgggagcaattgaaagagaccctcgagctggccctagagggtgtgggtaggagaatgggagaaatggcagtgactgctttgtggactactggggaaggattggggcgttagctgcaatgtggagcctgaacataaagcccaggcagccagtgatggcagaggagaggcaccagagccttggtgaggtctggtggatgcctggatcaagcctcacctgaagcagctagcttttcagttatgtgggtccatatttactgtgaaaacgaagatgatattaggttgatgcaaaagtaattgtggtttttgccattaaaagtaactggaaaaccacaattagttttgcaccaacctaaataatatgtgacattgtatagctcctactacatgccagacccttatttttttttctttttttttgggggggatggactcttgctctgttgcccaggctggagtccagtggcgcgatctcggctcactacaacctctgcctcctgggttcaagtgattctcctgcttcagcctcccgagtagctgggattataggtgtgttccaccacacccaactaatttttatacttttagtagagatggggtttcaccatgttggccaggctagtctcgaactcctgacctcaagtgatctgcccacctcggcctcccaaagtgctgggattacaggcgtgaggcactgcgcccagcctaaccacttgccttgtattaatctccattgcacagatgaggaagctggggcgcagagaggttaagcaatttgtccaaggccacacagctggcgtggccagaaccaggattcctggacccctcaccttgtgttcagttctgccacttgcttctgtttttacacccaaaggagttctgactgtttcccagtaatgccagaggctgcataactggagagaggaagtaagagccactcttcctttgcctagaaccgtcagtggctccccgaggcccctgggttaaagaccacaatccccactgtggccggcaagccctgcacaatgcagttccctctatcacttcccgtcctgtctcccactgctgtccccacgtcactcagccctcaccgagctcctctttgtccctccaatttgccaaacacctcaggacctttgtctgtgctgttccctctgtctaaaatgcccttcctctgctgctcctcctaaaccaagagcaaatgcgtatcctcagagaagtgacccctcacagccttcctcctgacccggatctaggctaggaaaacccaggcaggaagaacacaggccctgaggcagctggccccagttcaaatccgactccatgactgccttgctgtgtgaccttgggcggataccttgatcgctctgtgcctcagtttcctcatctgtaaaataggatgttaataggcaggtactcctgccttataagtttgggtgaggatcagaggaggctattatgtggaacgtgattagaacaatgctgaactcagttatgcaggcagctaataacagtagtgtaaaggcaagggttggtgcactattcacaatagcaaagacatggaatcagcccaaatgcccatcaatgatagactggataaagaaaatgtggtacatacacaccgtggaatactatggagccatacaaaggaatgagatcggccaggcgcggtggctcatgcctgtaatcccagcactttgtgaggctgaagtgggtggatcacctgaggtcaggggtttaagactagcctagccaacatggtgaaaccttgtctctactaaaaatacaaaaattagctgggcatggtggcaggcgcctgtaatcccagctacttgggatactgaggcaggagaatcacttgaacccaggaggtggaggttgcagtgagccgagatcgcaccactgcactccagcctgggggacaagaaggacattctgtccccgcacccccccccccaaaaaaagggaacgagatcatgtcctttgcagggatgtggatagagctggaagccatcattctcagcaacctaaaccaggaacagaaaaccaaacgctgcatgttctcacttataagtgggaactgaacaatgagaacacatggacacagggaggggaacaacacacacacacacacacacacgcacacatgcgcgcgcgcgcgcgcgcacacacacacacacacacacacacacacacacacacacacaactggggcctgttgggggagggcagggtgggagagcatcaggaaaaatagggaagccaggtgcggtggctcgtgcctgtaatcccagcactttgggaggccgaggcgggtggatcacgagatcaggagatcaagaccatcctggctaacacggtgaaaccccgtctctactaaaaatacaaaaaaaattagccgggcatggtagcgggtgcctgtagtcccagctacttgggaggctgaggcaggagaatgctgtgaacctgggaggtggagcttgcagtgagccgagattgagccactgtactccaacctgggcatgagcgagactccgtctcaaaaaaaaaaaaaaaaaaaaaaaggaaaaatagggaatgccgggcttaatacctaggcgatgggttgacaggtgcagcaaacccccatgacacacgtttacctatgtcacaaacctgcacgtctcgcacatgtaccctggaacttaaaaaaataaataaataaagggaagggaagaatgggaagctagtgtttaatgggtatgctgttttggttttgcaagatgaagcattctggaggcggatggtggtgatggttgcacaatgtgagtgtgcttaatgcctctgaactgtatggacgctgagaaatgattaaaatggttagttttacattatgtatatattactacacaaaaaaggcagatgtggctgggcatggtggctcatgcctgtaatcccagatctttgggaggccgaggctggcagatcacttgaggtcaggagttcaagaccagcctggccaacatggtgaaaccccatctctgttaaaaatacaaacaaaacaaaacaaacaaacaaacaaaaaacccaaaactagccaggcgtggtggtgcatgcctgtaatcccagctacttgggaggctgagggcaggagaatggcttgaacctgggaggtggagatttgcagtgagtcaagaccatgccattgcactccagcctgggcaacaaagtgagactctgcttaaaaaaaaaaaaaaggcagatgtaaaaaaagtaaaattgtgatttcaggaagcccctatcttttctttcaaggcccttatctcaccctataattaagcatatttatgtatttttatttatttagttttgagacatgatcttgctttgtcacccaggctggagtgcagtggcatgatcatggttcactgcagccttagactcctgggctcaagtgatccttccacctcagcctcctgagtggctgggaccacaggcaggcaccaccacacctggctgactttcgtatttttttttggagagatggggtcttgccacgttgcccaggctggtcttgaactcctgggttcaagcaatcctcccaccttggcctcccaaagtgctgggattacaggggtgagtcaccacacctggcaattaagcaatttttttttgagacaaagtctcgctctgttgcccaggctggagtgcagtggtgttatcttggctcactgaaacctctacctcccgagttcaagcgattcttctacctcagcctcctgagtagctgggattacaggtgcatgccatcacgcctagctaattttttgtatttttgttagaaacgggattttgccatgttggccaggctggtcttgaactcctgacctcaggtgatccacctgccttggcctcccgaagtgctgggattacaggcgtgagctaccgtgcccggcataattaagcattttcaaagcataatttttccatgagcgcctgtcttgccggctctgctgtatgggtcctgttttactgaactttggttttcttggtccagcccagtccctgggcagggtggggaaagcagtttgcctcacattgtctgcagagaattgaaaagcaagaataaaaatcaccagaaggcagtctgcttttatcattcacatatgcccagaattctaaagaatgttagtaataaaataccctgaaaaaaaaaatcttttggccgggcgtggtagctcacgcctgtaatcccagcactttgggaggctgaaatgggcagatcacctgaggtcaggagttcgacaccagcctgcctaacatggtgaaaccccgtctgtactaaaaatacaaaaattagccggtcttggtcgtgggcgcctgtaatcccagccacttgggaggctgaggcaggagaatggcgtgaacccgggaggtggaggctgcagtgagctgagatcatgccactgcactccagcctggccagctgagcaagactccgtctgaaaaaaaaaaaattggttccaaaaaattactgcggttacagctgaggtttttttttttgtggttgtttgttttgataacttttacattttgaaatagtttaagacttacaagaagctgcaaaaatagcacagagctctcatgtcccctgcacccagcttcctctaacaagatcttacatgaccacagtccagtgtcaagatcagcacattgcatgagtgagttagccctacatggatgggtataaagaaattaatagaggctgcgtgcggtggctcacgcctgtaatcccagcactttgggaggccaaggcagggggatctcctgaggtcaggagtttgagaccagcctggtcaacatggcaaaacccgtctctactaaaaatacaaaaattagccgggcgtggtggcacgcgcctgtaatcccagctactggggagtctgaggcaggataattgcttgaacatgggaggcggaggttacagcgagcaaagattgaaccactgcactccagcctgcaagatggagtgagattctgtctcaaaaaaaaaaaaaaaagaagaaagaaatagaaataaaaggaaactcatgctaaaaaaaaagatcaggacattgatgctgatagaatatgactgattctctccagtacagaatttacttggatttctctagttactatttattttcataatttacgtatttatttatttgaggtttcataatgtacatgtaaacttcaacttagcgcattttcatcatttattcttggtgaactttgtgttctccatggaaattaattcagagaaattcccatgtacagaggcagtccacataagcggatttaattatccactttctttttcttaaatttatttttagttattgtggaaccataataggtgtacatatttatggagtatatgtgatattttgataaaaacatacaatgtgtcctgataaaatcagggtaattgtgacgtccattaccccaaacatttatttgtgttaggaacgtttcaattacaattgtttaattatttcaaaatatataataagctttttttttcttagatggaatcttgctctgttgcccaggctggagtgcagtggagtgatctcagctcactgcaacctccgcctcccaggttcaagcgattctcctgcctcagcctcctgagtagctgggattacaggtgcccaccactaggcccagctaatttttgcatttttagtagagacggggcttcaccatgttggccaggctagtctcaaactcctgacctcaagtgatccactcgcttcagcctcccaaagtgctgggattaccggcgtgagccactgcgcccgaccttcaataagttattgttaaccatgggtgccctattgtgctacggaacactaggtattatttcttctatctaacttttttctttctttagagacagggtctcgctctgttgctcaggctggagtgcagtggggagatcacagctcattccagctttaaattcctggactcatgcgatcctcctacctcagtctcctgagtagctgggaccacaggtatgtgccaccatgcctggctaatttttaaacttttaatagagatggggatctcacgatgttttccaggctggtcttgaactcctggcctcaagtgatcctccctctgcggcctcccaaagtgctgggatcacaggtgtgaaccactgtgcccggcctctaactatattttggacccattaaacattccttctccctcttcctcctcactacccttcctggcctctggtagccatccttcaactatctactttcatttggagaaacaatggtttggaatggcttgagtgtctctaaacctcatgatagtataatacatctacgtcttcctggatttagactagaaagaaataataaaagatgatttaaagatgaaaacacagaacttgaatgacttcaattctgtactttgctgtgaccactgggagatttttttttttttttttgaaacggagtcttgctctgtcgccgaggctggagtgcggtggcgcgatctcggctcactgccagctccgcttcccaggttcacgccattctcctgcctcaggctccagagtagctgggactacaggcgcccgccaccacacccggctaatttttttgtacttttagtagagacggggtttcaccgtgttagccaggatggtctcgatctcctgacctagtgatccactcgcctcggcctcccaaagtgctgggattacaggcttgagccaccgctcctggctgggagattttatttgtattgaaaccagcggagcattgcaaaccgttaggtgtagatgtttgcaagtgtaaattttagttcatacatgaactctagtgccgaattcgaatgatatctttaaaatggcaacttacgctttaaaatttgttcattgttttcacgctaaagaatgaggcaagaaaataaaatgttacatcattttacatcagtctttacaccattgatttagtgacttgctggaattgcgctgcttgcagatatttcggttttattaaagttcccttagttattggacaattatttacataaaatacgattatatcagacattaaccaaattttcagtgtctgcatttctttctttctttttttcctttctttcttttctttctttctttccctccctccttctctctctctcttctttctcactttctctttctttctttccttttctttcttttcttactttcttccccctccttccttcctttctttccctccctccttctctctctctcttctctctctctttctctctttctctctctttctttcccttccttccctccttccttccttccttccttccttccttccttccttccttcctttctttctttctttctttctttctttctctctctctctctctctctctctctctctctctctctctctctttctttcttttctctttctcagagttttgctcttgttgcccaggctggagcgcaatggtgcgatcttggctcactgcaaccttcgcctcccaatttaagtgattctcctgcctcagcctcccaagtagctgggattataggcacgcaccaccacacccagctaatttttgcatctttagtagagacagggattcgccatgttggccagtctggcctcgaactcctgatctcagttgatctgcccaccttggcctcccaaattgctgagattacaggcatgagctactgcgcctggcctgcatttatttcatggttattgttttatttcatgattattgctgaagatgagtctattttatagagaggagaaattgaaaaatgatcccagctggtgtcaaatacaccaggaacgctgctcgaaataaatgttcaactgcacgcatgttttttccagcacaattcacaattgcaaagatatggaaccaaccggtgtggccatcaatcaatgagtggataaagaaaacgtggtatatatacatcatggaatattattcagccatgaaaagaatgaaataatgtgtttcgcagcaatttggatggagctagggccattattctaagtgaagtaattctggaatggaaaaccaaataccgtgtgttctcacttataagtgggagctaagctatgaggatgcaaacgcatagaatggcatcatggatttcaggcccttggggtgggaaaggttgggaggcggatgagggataaaaggctacatgttgggtacagtgtacattttcaggtgacgggtgctctaaaatctcagacttcaccgctaaacaattcatccatgtaatcaacaccaggccaggcgtggtggcttacacttgtaatcccagcattttgggaggccaaggcaggtggatcacctgaggtcaggagtttgagaaccagcctggccagcatggtgaaaccctgtctgtactaaaaacacaaaaaaattagctgagcatggtggcaggtgcctgtagtcccagctaatccggaggctgaggcaggagaatcacttgaacctaggtggtggaggttgcagtgagctgaggtcgtctcattgcactccagcctgggcaacaagagtgaaattctgtctcaaaacaaacaaacaaaaacaaacaaacaaacaaaccaaaaaaccaaaaaccaaaaacaaaaaccacttttaccccaaaagctactgaaaaaaaaaaaaattatggctggcagtggtggcttatgcctgtaatcccagcactttgggaagccaaggcgggaggattgtttgagcccaggagttcgagaccagcctgggcaacatggcgaggtcccatctctacaaaccagaaaattagccaggcacggtggcacacatctgtaatcccagctactagggaggctgaggtgggaagatcacttgagcccaggaggtcgaggctgcagtgagctgtgttggcgccactgaactccagcctgggtgacagagaaagcgagccttgcctcaaaaaatatttattaaaaaatagaataaaaaagaaaaattaaaagaaaaagaaaaagaaataaatatctgttgaatcaaccaatgaaggagggtgcagttccatacagcgcccaccaggtgccgctgctcccaagcctaggccggctcagcgactctgcagggtgaatctcaaccccagccccgcctcggggtcgcacctcaggacgtctccttttccaatctgcagcgtggctcggcctcctccctcatcgcaaggctcccactctgcccctggagtccagtcaaccccgcagccacttgcagaaattttcctataagcagttctgaccacattcctccacttcctgttgggttcctgggacaggttcctgccgactcttacctctgggcctttgctgctccttctgcctgggatgccctttcattagaaaactcatatagtacttagctccacttcttcctgggggcataccacttaattgctccatgcctcagtttcccctgatgcagaggctggacagagaggctttgtccaagaaaagttcagggccaggaattagacaatctgaaaggcaatggggagccatagagggtgtttgagcaggagagtgtcctcagatgtaaggaaggacagagcctccttccctttgcccctggatctttctagaagggccttacggggttggaatgggagactttagctgtggccagctcagactccacttactgggctcccaggggctggacaagcaggtcttcctccccctgtaccctcctggtggggctgtttactctccagtgatgtccctgagtctgggccatcccacagcacctgctccctgggcagacaccaggtgcggggacacccctggagggaaagccacaagcttcaggctgggggcccgggtgtcacctttacggaagcgccggtgactacctccaccgcgggaggttccacaaggctgatgaggctcacgtgggactcaccggggagacagcgtccagagcaggtgaggacggcatgctgggctggcccgttcagggggctggaggacattcagggaccccacacccagctgctgccccctgcctgtctcaggccctctctctgactctgtctccccatctctgtcccctccaccctctcaactctgtcctttctctctggcgctgtctctctctgggtcttgttcactgtcttggagctctccatgctgtgtctctttctctctctgtgtctccccatgtctctctcgctgtctctggccctctctctccctgggtctctggttcagggggggtctctgtctccgtttgagtctctgtctctctctgtgtctctgcctgtccctgtctctgctgccccatccaagccctgctctcagggtggggagaacaggttctaccctctccgaggttctcttcctcattggcttactctgacccggtccctaagggggaccaccaggcactgcccaggaaggaggagggagcaccaggctgcagaaccccatgctgcctccatctgagaaggccctccatagccacgttctccctacagcccaccttgtgcacaaagccagtgttctccctgcagcccaccttctcccagaaaccctcctgccttctccacgcagcccatcttctctctgaagcccaccttctccccacagcccacctcctcccgcagcgcacctcctccctgaagcccccttcttcctgaagcccacctcttccctgaagcccaccttctccctgaagcccaccttctcccgcagcccaccttctctctgaaacccacctctttccgcagcccaccttctcctcgaagcccaccttctctctgaagcccaccttctcccgcagcccaccttctcccgcagcccaccttctcctgcagcccaccttctctctgaagctccccttctccccgcttgttttcccacctggctccaacctcctgtcctgcctttttacttctacgggtgcagcccccgtacctggccctgctccccacacagcacagctgccgccgcccaatgtttccctgctgcgcccaggcctgtgctaggtgaatggaagagcatggcctccttgcacttctgcaaagcagctaatcctgggcccctatgggtggcaacacctgtgtgtgtgtagcagggaactgaaggggggtctggaggtctccaaagatgatgcctcatgcaccagggagggtctggctgttgtgtggctgtaggggtccttattcttgggacctgctccaggggaggtgggggagtccagcttggctctgtaaatctggtggttaggtgggtccagtcaccgtgctgaaggtctttgtcctgggggttgtctgtggttggcgtttgactattgaggggatccagttgttgtaaggatttggggtgcagtattctgggggctctgctgttgaaaggagtcttgttcctgtgcctgtctggggtggttttgtggaggggggcggttttcgctccggtgggaggtccaaatctgtggagattggcgattgctttttttttttgagacggagtctcactctgtcaccaggctggagtacagtggtatgatctcggctcggctcagcctcctgagtagctggggttacaggcacgcgccaccacacccagctaattttttttttgtagagaggggggtttcatcatgttggccaggatggtctcgatctcctgacctcgtgatccacccgtctcggcctcccaaagtgctgggattacaggcgtcagccaccgcgcctggcctggcgattgcttttgtctgcagggggtcgttggggactctggctgctgcagggtcctgttgctttaagattgatggttgcggggacgtgactgctgtgagtgacagttgctaaggggttgggagtatttgttgcaggcaagttagggacacagacctccagctgttgtctgctggagtctgatcgctgtgtgtgggattgtagttagtgggtgagtgacagtcctctctcactgtaaatctctctccgtctctacctctttctctgtccctccacaccgtgctttcattcaaagatttgttgaggaatcattggaataattacggtgaggccagtgtctgactgcagcaggtttctggggggctctcagccctgctcagacggggagaggaggcaggacacccctcattttccccaccacctgtgatcagccctgggggtgggaatcactggctcacatgggccaaaagagctagatgtttgggtctcagagaccacaccccattctgaccttgttctcaaacttcaaggctgaggctgaggggcttggtgggtttggcaggactggcggtcttgggtgggtgcagggactctccctggcgaggggggaacagagagggttacaggcattgggagagaggaccagccatgcagatatctggcaggagcattccaggcagagggcacagccagcatgtgcaaaggccctgaggcaggacagtgcctggtgtgttgagggaagagcaaggaggcctgcgtgcctgaaacagaatgatcaagaggtagcaggatgatttggtgttacaaccaccacttccgagccgggagctcctgggcccaagcctctttggggtgcacatcttcctaacaggctcagctgcgggcacttcccctacagctggggttctccaccatgccctattgatatttggggccaggcagtcttttgtcttggggggctgcgttgtgcattgtaggatattcagcagcgtaaatatttagagaccagtaggggcacctggtctctacccaccaggggccagtagcacttcccaagtgaggataacaaaaaacattgacaactttcccctgggtttagaaccattgtcctaaagttggaagtggggccgagagtgggaggctgcctggggggactggggtgggagctgcacaggacaagtgaggatttctggtgtgaccttaagtgaacaagcttcattctcctcacctatcaaatcagagtctggggtgatgagaggattctattcattcattcattcattcattcattcattcaacaagtatttattaagcatctactatatgccagcccccacagtgaggatataccacgaggaagaaagacaggcagtggcgtcatgaaagaaagagagacgttagttgctgggcgcagtggctcatgcctgtatttccagctgttcaggaggctgaggtgggaggatcgtttgagcccaggaggtcgaggctgcagtgaggtatgattgcaccactgcactccagcctgggtgacagagcaagaccctctctctaaaaaaatttaaaggctggttgccgtggctcatgcctgtaatcccagaactttgggaggccaagctgggtggatcacctgaggtcaggatttcgagaccggcctggccaacatggtaaaaccctgtctctactaaaaatacaaaaaattagccaggtgtagtggtgtgtgcctgtgatcccagctactcgggaggctgaggcaggagaatcacttgcacctgagaaggcggagatggcagtgagccgagatcacaccagggcactccagcctgggtgacagagggagactccatctcaaaaaaaaaaaatttttttttaaaaagaaagagacattaatgaaataattacacagatacctgtaaaatcgcaacaatactaaacgctgagaagcagaagcacctgacttagtctggtaggtcggagagggcttcccagagaatatgtgatcagaggagggggatagaggaattaggggagaggaggaagagcgttgcaggcactggagctgcaggtgccgaggccctgcggtgactccgaatggtgggaaggccagtgtggctggagtagggtcaggatacgctccatctggatctcccaggccctgtgagtgggggaagagagtgcagtcttgatccgttaaaggttttaagcaggaaagtagcataatctgatatgcatggtaaaaagatccctccagcagatagtgtctgtgaagtgcttagcataggcagtgtaagggactcagaaatgagttggatgatgccaacgggtattttggggacccagaggtgtcacaggctccaattcgtgccctctgagtccccacggatgaagctctggcctgtttccaggagcccatggtatattctaggcttggggtgagggggtggaaaagaagaatttccctgttttgagcatagtttcggagatgggggaaggacggccacctctagggtggtggggggagggctccaagggccggaagacacttctttcagtgaactcctgggcccgtttcacagaagggagactgaggccctggggcctcatgagcacccagtcctgagctacaacaccggccactgccctgtgggaggtcccagaggagctgtgtcttggcatcaaaggcgcttttgggacctgctcacagttcaggccacatctcaggcttggcagggtaggccctgggctccggctgcccaggcaccaaacccacctgtgactagctgtgtgaccctaggcaagtcggtgcatctctctgggcctccgggggaaaaagagatgtggagtctcccaagggtgttgtgagaattaaacaacattgtttacattccttcattcaacaaacagttattaagcacctactgtgtgtcaggtgctgttttgggcactgtagacacagagggggaatggtccctgttctcgggggctggtgttctagcggcagagacatacaccaagcaaatacgaccatcggtaatgataaagtaaggaagttcatccacgttgtctcaaatggcaggattttccttgcttttcaaggctaagtagtattgaattgtgtatacatatcacatttccttccttccttctttccttctctccttccttccttcctcccctccctccctccttccttccttccttccctccttccttctctccttccctcttccctccctcccttacttttttttttttttaagatggagttttgctcttgttgcccaggttggagttcgatggtgcagtctcggctcactgcaagctccacctcccaggttcaagcgattctcctgcctcagcctcctgagtagctgggattacaggtgcccaccaccatgcctggttaatttttttgtatttttagtagagacagggtttcatcatgttggccaggctggtcttaaactcctgacctcagggtacctgcccgcctcagcctcccaaagtgctgggattacaggtgtgagccaccatacctgccctccttccttcctccctccctccctcctttcttgctttctttccctcccttttccttccttcctttcccttccctttctttcctccctccctctccctcccttccgtccccctccctcccttccttccccctccctcccttccttccccctccctcccttcctccttccttccttccttccttccctcccttccttcttcctttttcccttcccttttctctctctctctctttttttctttcctcctttctttttctctgtcacccaggctgcagtgcagtgatgcaatcatagctcactgcagcctcgacctcctgggttcaagcaatcctcccacctcagcctcccaagtagttggaactacaggcatgcaccaccacgcctggctagttttttgtattttttgtagagatgggtttcgcccaggcttataccatattttctttatcacttcatccatccgtggtcacttaaattgcttccatatctgtgctattgtgaatagtgcctggagtgccagtacctcttcatactgatttcaataagtgtatgagctgatgggtttgttaacgagcctggtttaatcattccacacagtacacatacatcaaagcctcacatcatactccacaaatatctgcaattattatttgtcaattaaaaataagaaaccagggcacagtggctcatgcctgtaatcccaacactttgggagtccgaggagggtggatcatttgaggtcaggagttcgagaccagcctggccaacatcgtgaaaccttgtttctactaaaaatacaaaaattagccaggcatggtggcgtgcgtctgtaatcccagctacccgggaggctgaggcaggagaatcgcttgaacccagaggttgcagcaagcagagatcgcgccactgtaatccagcctgggcgacagagtgagattctgtctcaaaacacaaacaaacaaaagatacagtaaaataggccaggcgaggtggttcacacctgtaatcccagtgctttgggaaactgaggaaggagggtccactgaggctaggaattggagagcagcctgggcaacgtagcaagacccagtctctacaaaataaaaataaaaaaaactggccaggtgtggtggcacatgcctgtagtcccggctacttggaaggctgagacaggaggattgcttgaacacaggagggtgaggctgcagtgagccatgattgcaccacaacactcaggcctgggtgacagagcaagactctgtcttaaaaaaaaaaaaaaaggtgaaaaagtaaaggaggggagcaaaagtgtctggaataagcagaataaggagagaaagtgagtgtgtaagtgtgtaagtatgtgagtgtgtgtgaatgtgtgggtggctgtttaggctgggggtcaggggaggcttgctgaggaggtgacattggaggagaaagacctaaaggaggtgagggaggagcgatgtgagtgtctggggaacagcattcctggcagagggaacagcctgtgcaaagaccctgaggcaggactgcattggggtgttggaggaacacggaggaggcccatgcggctggagtggagtgagtgagtgagtgtgggaggggatgttgcagttgtccagttacgtgaggagaagagtccaagagaggtggcaggtggaaggatcttagatgaagttttccttttcttcctttttttttttttttgagatggagtctttctctgttgccagtctggtgtgcagtgacacgatcttggctcactgcaacctccgcctcctgggttcaagcagttatcctgcctcagcctcctgagtagctgggattacaggcacccgccaccatgcccagctaatttttgcatttttagtagacatggggtttcactgtgttggccaggttggtcttcaactcctgacctcttgatccgtctgcctcccaaaatgctgggattacatgcatgagccaccgtgcctggcctaaatttttctttttctttttccttttttttttttaagagacagcgtctcactttgttgccagggctggtgtgcagtggtgagattatagcagactgcaaccttgacctcctgggctcaagcgatcctcacgcctcagcctcctaagtagctgggactacaggcatgtgtcaccatgcctgggttttgttttgttttgttttttgcttttttaagagatggggtcttgctatgttgctcaggctggttttgaactcctggccctaagtgatcctctagtcttggcctcccaaggtgctgggattacaggcatgatccactgtgcctggcctctatggcaatttttgaaggtgaagccagtagtttcctgagttgggctcagatttgggggtgagagaaaaagaggagcagaggacaaaagtaggggttttggcctgagcacttgcagggctggtggcagtgggggatggaactgccatgaactgaggtggggaaggtggagggggagctggtggtggggaggggtggaactgccatgaactgagatggggaaggtggaggggacgctggtggtggggaggggtggaactgccatgaactgagatggggaaggtggagggggcgctggtggtgaggcacatcacttgctgggttttggccacgttgagtatttgatgctcgcgggcgttgggaggtaaatgtcccacgaatgctgagtttggggtgaagccagctgggagtcacaatctcctgggctcagcgtagaattaacaaggtgtggtgtgtgtgtgtgtttgtgtgtgtgtgtgtgtgtgtgtgtgtgtgtgtgtgtgtgtgtgtgtgtatgtatgtgtgtttgttgtgggggggacttggtggcctgagtggggtccagccacctgctctgggggatgtagggactcaggtgcctcgaagagagaccctcctggctggcgttttagtgggagctggggcttggccttggatggacacgaggtgcctctgagcttccttcctttgaggctgtgtggtgactgaggccagtgccctgcagagagggaaaggcagaacctgaggggcccgttgggccagagactgtgggctccaagaccgagatgaattttgctgggagtgagtttaaggaagtgaatttccactgcacggcatccatgcataacagccctgacgtcacatcagaccccgtgagccctggtgagcctcccttggagctcgggtgtccaagaactgagtatctgttatgttggtgaacaatgtatgtaccgggttacctgttcagcctttgctgcaaacctgtgcccatttcacagttcaaagaactgaggctcaggaaagaggagtcacttgtccaagtgtgtctttggcagagcagggactgggtccttggcctcaccggctctggacacccctgcccaccccccacttcctgcccatcagcctgttcctggcactcgggaccccagatgggcttgtgggctgggcacgggagataccaacggcttccggtctcttcccctgaggctcaggaggtgccgggggagggggagggcgggccacggctcccagggtgccttgcattttccccttgaagactgagttcccacagaagcgtctcggttttagagatcggtttcgctgggggcttttatgaggcaggggctccatcagattgagagtgcagggccccgaggttccattgggttccctgaaccccgtggaaatgtggcccttccgagaaacctgggctgggctgcccagggccgtgggaatagcctctatgggtccctggttctccttgggcagacttttgagtcagaggaaagccagcttggggaggaaagcaatttcctcatctcaggccccccaagtctgggcaggaggggtggagaaggcagagagctggacctagagaagtagtctccaactccctgcttgcacaccccctgtgacgggcagctcattacctatcaaggcaaccttgcttggttagtgagctggaattcttacaaaatcctttcagatgctggttcaaaactgcaccttcatccctctctctgtggtccttacctagctttctggaccacacggagcacacccccttctccaaatatctcacactcttatatttattcgactgtctattcaggagatgtgtggacacaggggcagacccagagagattgctgcagcaatggtggaatcccactgggtcctgggaacctagaaggcgcttctggcctatctgagaggaatcaatttggtgggcttcctgtaggaggtagcatctaagctgtgtcttaaaggacaaatatgatttggcttagggaagaggtgagggaagaatgcttcaggcagaagaaacattatgtggaggtgagggaccattctttcatgaagtaaaaaatggtctacgtggctggagtggtgtgtttgaggagggctaagggggtactaaggccagaaaagggatagagaaaagcctggagcagtgacccaggtagcagaaaaacaataccctcattcttcaaacagggtatgagtccaaatttgttttgtatttcttaaacatttttttaagagagatggggtcttgctatgttgcccaggctggtctccagctcctggcttcaagtgatcctctcacctcagcctcccaaagtgctggaattacaggcatgagccttcatgcctgactcatttcacatttctcaattgctttgccaggaagcaaggtataccttctaggtacacaagtgcccatcttactgcatccttgctagcattaggttttattgtttttaagaaatctttgccaatttcggcaggaaaaattggtatctcatgtaaatgaaaacaaatgagtatttcccttgtaagcgacatgcctaaacaatttctccagacatgcattggcctggcaaatgctaccttttgcctgagtgttaagaaatcttacactcgctggagagtttgcagtcatttttagctcctctcttagagcaaaagaaaagcttgtgggctaccctctggccacatgggtggaggaatttgtgaggcagcctcctcccttctcctttgattcatctttctttttctcacctttttttttttgtccttttaaacttctctgtactctgttggcctctgagtcttctggtaactgtagcttcatcttcatctggggtgtctttgggctcaaaaaagagggttggcaaaccacaggaagactccccaagtcttcataggagactatgctgatatgctgagtatcttcttcttcttcttatttttgagacagggtgtcactcctatcatccaggtgggagtgcagtggtgccatcacagctcattgcaaccttgacctcctgggctcaagcaacctcctgcttcatttttttttttgatttttttgtagagacaaggtctcactatgttgcccaggctggtcttgaactcctaggctcaagcgatccacctgtctcagcctcccaaagtgtgagatgacaggtgtgcgccaccgtgcccagcctatgccaggtatcttatatcttatagacacatcttaccattttagttctcacaacatctgcctatgatgataaccttgaaccccttttatagatgaggagctgaggcttagagaggttaagtcactcagtcagtatcccatggccaatattggctatttctcttagtttcactcaataaattactcttatgacattaagattttattaaattctaatttaggagcagagggttggccatttatctttctctttctgtcaatctctctctccttttttgagacagaatctcactctgttgcccaggctagagtgcagtggtgtgatcacagctcactacagcctcgacctccccaggctcaggtgatcctcccacttcagcttcccaagtagctgggaccagaggtgcacaccaccatgcccggctaatttttgaaaacttttttttttttttttttgtagagacagggttttgccacattgcccgggttggtctcggactcctaagttcaactgttcctcctgcctcggcctcccaaagtgttggcattacaggtgtgagccacctcgctcggctgttggccatctctctctacccactgtcccaccctgccctgtcaggggatggaagccccattccttattagggagggactgtggagtccagttcagcaccagccttacaatgcaaggaaagaaaagaaaacaggaaagagggaggggaaaccacaaacaacccttagagagccacaagtggctccagggctcagttcctgagttagacctcggttttgggctgctaaattctaagctccaagctctagttccatctctgccactaaaaccccatatgaccttgataaattctttaccagctttgggtctcagtttttccttctacgagtcaacccatctcttggattttctgggaactacagtcatcccttgatatctgggggggattggttctggggtctcccttggatattaaaatccatggatactcaagtttctaatctaacatggtgtagtatttgcatataacctatgcatatcctcccaaatatttatttatttatatttttatttttttgagatggagtctcgctctgttgctcaggctgcagtgcagtggtgcgatctcggctcactgcaacctccgcctctcgggttcaagtgattctcctgcctcagcctcccaagtagctgggattacaggtgtccaccactacccggctaatttttgtatttttagtacagacgaggtttcaccatgttggccagtctggtctcgaactcctgacctcaagtgatcccccaacctcggcctcccaaagtactgggattataggcgtgagccacagtgccctgccctcccatatactttaaatcatctctacattacttatgataactaatacaatataaatgctatgtaaatagttgttatactatatatgtattttttattttatttttatttatttatttattttttgagacagagtcttgctctgtcacccaggctggagtgcagtgacagtggagacttacttcagcctccacctcccaggctcaagtgattctcatgcttcagcctctccagtagccgggattacaggcatgtgccaccgtacccagctaatttttgtatttttagtagagacagggtttcaccatgttggctaggctggtctccagctcctggcctcaagtgatctgcctgccttggcctcccaaagtgctgagattataggcctgagcgactgtgcccggcatatacatatataattttaaatttgcattatttttattgttgtcttgttatttttttcaaatactgtattttcaatctgtggttggttgaatccatggatatggaacccgaggatacagaggaatgatggtatacttttcatatctgagctctaactggttctttttatatctacatgtttttctttcataacctcctgttcttgtttgacagttgtcattccttcctttatctttctgagtcacctaacatattcattgtacagctctttcaagattaaactgatattctctatttcctcagatgtaatatcttctagttggggagtttgtgggaatttcttgaagtggccacagattcattatcttctttaggttatttctccttggtctgggccttctgcacgtgcatgcttttgaccttatatattaggggactctgcacttccatgcgtgggagacttttatccttgtcattgggcatctctgctttggtctctggttcaagttagcattttcccaccatttctcagtgtctgggaggaatggggaggttttggtgtgtatttggtctcgagtggatagtcaatttaccatctgtaaacagatacagttgtgttgggtgatgtccgaaggttctcagagacattttcaacacagatagtacagagtgtggccggagaagtccagtgggagaggattcttttattttttgagacagagtctcactctgtcacccagactggagtgcagtggtgcaatctcggctcactgcaacctccatctccaggctcaagtgattctcctgcctcagtctcccgagtagctgggactacaggcgtgcactaccatgcccggctaatttttgtattttttagtagagacagggtttcgccatgttggccaggctggtctcgaacttcccacttcaggtgatctgcccaccttggcctcccaaagtgctgggattacaagcatgaaccaccaagcctggccaagagaggattctaacaacaataaatgaaaaatagctatgtgggttatttattattatcaggtaccagctcttaacacatcttaccttatttattccttatacaaccaatgaggtaggtactgctattattccccttttgcagatgagacattggaagctcatagaggtgacctgacttgcccaggcacacttagctagggaggaaaatttgaacccagttaaagcaggtgttcttaatcctgcctatttcattgcatcctgacagcatggatactaatctcagccttgccgtattgttaactgtgtggtttcttgacccttttgttcctctgtggaaaccaacctctacccttcagaggtgctatgcaaactcaaaactgtgtcctcactgaaacaagtggaagtatctggggacatttaacctggtgcattaggaagggtttgggtactggatcccattgtacctggattctggctgtgcgacctcaggcaggtcacttgacctctcagagctttgctttcctgatctgtcaaatcaggatgatagccgtgctttactttcctctctgggtagtggtgagtgaaaagtgagatgttccatgtacctggcatacagtaggtgctcaatacacaagaattgttttccctggaggagagcaggctgttgtgggaatagggaaatgtcagtgtcaattcctcaaatccccaaagggttctagggtccagaggaaggggagattctccacggatgttaaggaaagaatgaattctagcagggatgggtccagcaaaggtggcttctagctctactccaggaaaactttttggaccatgagagctcacctaatctgacaggtgactttttttttttttttgaggcagggtctcactctgatgcccaggctggagtgcagtggtacatcacagctcactgcagccttgacttcctgggatcagatgattctcccacttcagcctcctgggtagctgggactacaggtagaaaccaccacacatggctaatttttgtattttttgtagagacatggtttcatcatgttgcccaggctggtcttgaactcctaggctcaagtgatccacctaccttggcctcccaaagtgttgggattatgggtgtgagccattgcacctggccccatattttttagaataaaccattaaacgtatgaatattttgggaatgaaccaataaatgcatgaatagttgaataaattaaagaatgagtgaaatgtgagtgagtgaatgaatgaatgagcagatgaaataatactcaaaaggcaggcgccatgagactggaatacagtctgattggatcctctctttcccaaaggggtggatgccggagaccttccagtgactaggagttcttgctgggttgggtgactatagaatcctgcaaggcttttactgtttgttttctgagctcagtcaagatttccagacatggccaggcgctctggctcatgcctgtaatcccagcactttgggaggctgaggcaggtggatcacctgaggtcagtagtttgagaccagcgtggccaacatggcaaaaccccgtctgtactaaaaatacaaaaattagtcaggcgtggtggcaagcatctgtaatcccagctactcgggaggctgaggcaggagaatggcttgaacctgggaggcggaggttgcagtgagctgagattgcaccactgcactccagcctgggtgacagagtgagactgtctcaaaaaaaaaaaaaaaaaaagatttccagacatgggaacctcttgaacacatgagcaggccacatggtgtggcagaacattctctctagtgactttagaggggatgagctccctgttacagaagaggaccaaacagagctttgatgtcactggtcaaggcagctgcggaggctgcttggctggggtggggctggcctgcgatggggccatctctgagagagacccttttcctgtttcttcatccccctccggccactgcaaggagtgctgcctgtctcgccaccctccgttagcacttcctctgcgaccacaggaaggcccagcccagctcttactgtgttttctttaaataaactcgggcagcagaactatctgctgccccatctccctctgggttcctgtggaggtgtagggggcggtggttaggggggttcaggccaagccacagacgggaaggactcagaccacagtgataacaaattttcctctatctcagtggtgtggcctgagagctgactgctcagagtcactctggcctgtcctttctttatgtgactaccagcccacactcacttctcttccttgggcattgctgattctggtgtggctcttggggacccctgggctgtgttcctcttcctttccagcccagctgtgttcatctcggagcttgcctaccacttctgtcttctctcctagagccaaggtggtactttctagatgctggccccagagctccgggatgtgccgtggacctctacacagatgttcatcaattcctgggctctggtcaacatccgttgaagttggaatggttgttgggaccccctctgatgtccccccaagacagggccaggaatgtggcaggggaattctgtggctagtgggggaccccaagtgagggcttgtctggggtcttgtctggggctcaggtgagctgtctgggcagtggaagacccaggcccagccctttgtggggagagaggacccattcaggctcactgcacctcactgttatgggttctgcccttttgagtattccttcatctgctcattcattcattcatttacccacgcttcactcaattttaatttattcaaatatccatgcatttattagttcattccaaaaagatattcatgcatttgttagttcattcaaaaaatccatgcatttattagttcattctaaaaaatagtcatgcatttattagttcattcaaaaaaatccatgcatttattagttcatgcaaaataatccaggcatttattagtttattcaaaaaaaatccatgcacttattagttcattcaaaaaaaatccatgcacttatttgttcattcaaaaaaaccacacatttattagttcattaaaaaaattcatgtgtttattagttcattccaaaaaatattcatgcatttatgagttaattcaaaataatccatgcatttgttagttcattcaaaaaatccatgcatttattagttcattcaaaaaaaatccatgcacttatttgttcattcaaaatccatacatttattagttcattaaaaaattcatgtgtttattagttcattccaaaaaatattcatgcatttattaattcaaaaaaatccatgcatttattagtttattcaaaaaaaatccatgcatttattagttcatgccaaaaatccatgcatttattagttcattcaaaaatattcaggcattcattcaaaaaatatttatgcattaaatagtttattttaaaaaatattcatatatttattagtttattccaataaatacttttacagggccttcctccttcattcctgatcctggggtggaggtgaattgaggaacatatgaacactggttttaggagtctaagatgcttatactttcataagcacaccccagaggcttttaagcaaaggataaatggaatttcaaaaagctacctctgggctcatggtgggtttgtgggggacaagggtggaggctggtgggggcccaggtgggatagaaaatgcttgggcggggaccagggctgtggggactggagagaggggtggatgcaactgtggaggagcgattagtgggaggtggcatgaatggggccaggggagaaggatttgaggggtgtcagtggcagctttggggccagagttggtggcggtactcacatgctaggagaagaatgctgcttacttttggaatctctgactgtccctgggtcagccacttaacttttcctgagcctcagttgcatggtctgtaagtggggatgatatgctcctgacagagggtatggtagccctaggtgtctataagggctcagtgaacttggacacctgagcaaggttatgttattagcctggctaccaggaacaaagctcagagacagctgcaggaaattgcaaacccagggcgtcccgtctggcacctgtggaccagggttcacctaactgcagctgcttccccagcccatgtgatgtgggcaggtgtggagccgcctaccactacagcaagtggcaacaggtggggaggtggtccagatgtctttcggcttcagagttggtcctggacttgggttctggagtctccccagtgaccaggatttctcagagggggtcccaggtatggacactgcagaccctcctgtgactaggagttcttagaggaggtcctgggcatgggcactggagtccctcccatgaatagaaattctcagaggagttcctgggcatgggcactggagtcccttctgtgactaggtggtcctgggcatgagtgctggagaccttccagtagctaggagttcttgttgacttgggcgactgcagaacaccacaaggcattgattgattgattgattgattgagatggagtcttgctctgtcgcccaggctggagtgcagtggcgcaatcttggctcactgcaacctccgcctcccgggttcaagtgattctcctgtctcagcctcctgaatagctgggactacaggtgcatgccctcatgcctggctaattttttgtatttttagtagagacagggtttcaccgtgttagccaggatggtcttgctgtcctgaccttgtgatccgcctgcctcggcctccaaaagtcctgggattacaggaatgagccaccgcgcttggccttattttttattctccaagcccaaccaagatttccagacatggtggcctcctgagcacatgagcagatcacatggtgtggcggagcagactcacacattagacagatttgagttcaaatcttagtcctgctgctgacttactgtgtgatgtgagcagatgaaagaccttctctagacatattttcttcttttattataatttcactcaacttttccatgagactgggagatttgtgaaggctgggaggcagtttgattttcttcttttgtctaccttacaacctggcacagtgaatgaatgaataaatatgcacctcaaattgttttgtgaagtatagtaagcatttcttgggcaaataaatttgagagcctctaagtcacaaaactaaacttttttttttttttttgcaggatttctcagagccttcaatgtactttgtgattctcctataaggaataaggtatgcaatatttctcaaacatttttgtattctttttctgagggcgcgtcatctttggcactggggttcctaggaacatactttgggaaatgtggacttaggatcattgtcagaggtccttggagtgttgctatttgtctggttgtatattcctttatcctctgtcaaacatgacctgaattatgtcacataaccatgtagcaacagaaactaaggtcaagggctgttagtgaagaataaaagactaaattagaatgttggggaagaaaaacctatactcccaatttaggaaagttactacggtttatcttaaaactcaacactgagtttctgccaaagtgaacagaaaaatgtggtgtctttcatggtttcttgggtgggagttcagcaagggggttaaatgctctccagctgtgaacaaggttgttttcattcatgtgttcattcattaagtcattaattcattcaacaagtgtttatttaccacctgctatttacaagcacaatgttaggtaccagggatacaagagtagaccaaaaaagacatacatatgcccttatggagatgacagtcatcggttttcagaacaaagatgatcggttttcagccctcagtgccccttctttcctgaagtttgttctgaatttttagacaggctccttccgccttgctgtggtttttctctccacctgttttgtatctgaatcacagaaggtgaagacatcccccaggtggttagtagaacccagatctttgtgttagagtcttcatgaaaaccagtgtgagaaactgggctgaggcaagggaggtagtcttccatccttgctatatctctgggacactgggcatcttttctgggctccaccctaggggttgggaatctaataactttgattttttttctctacccccaattaccaaccctctaattcttcaacactaggcacatgggaattgtgttttgttttcaaacctgggcaacaaagtgagaccatgttcctacagaaaatttaaaaatagctgagcataatggcatacaagtgtagtcccagctacttgggaagctgaggcatgatgattgcctgagcccaacagttcaaggctgcagtgaactatgatcccatcaatgcactccagcttgggtgacagtcagaccatgcctctaaaaaaattgcttttttgttggttggatgaatggatggacccatggatgaatatatagatgaatgaatggatttgtagaagagtgactgacacataggagggacatttggatgaatgaaagaatggaggaatagatggtggatggttgagatcagcaaatgaatatatggatgaaaagatgcctagtaaaggcacaatgtgatttaaaaaaaatgaatctctcagtgaatcaatggacggttggatgaatggatgagtgagtaagtggtagatgtgatggagagttgcacaatgaaatggggagatgggtttgagtgaatggatggtgagtgagtgaatgaatggataaatggatagatggtgagttgggtagagggatggacaaatggacagttgagtgaatgggtgagtgattggattacccgatgaatgggtgggtagttggatggatggaagggcaggtaaaaaattctggccacaaactgaagcgatcttggggtacaatctgggcacagtttaggtgaatagcagcttattttctgatcccaaattggctctgtttacctccatggatacatattctctatttctaggttcagtcatccttctgtctccctctgggtttccaagaatcttaccttggaactccaattgaactgagccctgggcttgtctgctgaccttctcaacagtaaggagaacacccctggaagagcatgtgtccttctgagggtacagggttgaaccagctcttcatgatgacggtggtctgctcttaagcctttctagcagtttcttgttttgtggcctcacccaatcttcactgggcatcaaacagatgaagatcgaaccttggtctccagctcagttccaactccacctgtcccctccatgggtgatggtggagacaaaggataaattagagaaaggggtcatccaggtccaccctttgccattactccaagaactctttcctttttcccaggttctccaagcagctatggatgtgggtttctcgggcctgccagatgtgtctcagagtcatagcaagaccttgtggggggctcggggcaggggcccctccatacgtcgccagcgggagttcatgccagaagaaaagaaggacacagtttactgggagaagcggaggaagaacaatgaagcagccaagagatccagggaaaagcgacgtctcaatgatgcagccattgagggcaggctggctgcactgatggaggagaatgccctgctcaagggtgagctgaaggcgctcaagcttcgctttggcctcctgcccctgactggtgggccccgggccttgcccctgcaggctctgctattggaagccccctggactggggacccccggcctggggctgaagcactctcatccttgtctggctctcacagctgcctcttaaggccacgttccctggatgctgggattccaggatgtcggggctgcctgctggctcccagatggactggcttggccacttctcctaggtccccccaagagtctgcatctcctaccctcaacagaattgacatggccttgcagactgccctcccacctgccctcttcagctgtcacctcttggaggggcatgtagggtccagaccagagctcagaccctgctgggggctgtggtcaccagtgccctctggatgccgggcttcagggccatcagatgtgttgctgacacccactgctgatcccatgggtctgtctcctggggtgacctgccctgccccagggaacagtcctgagggtctgggtcagccctctctgccccacaaactgcgcatcaagtcccgagcctcaggcagggtacctcgtggctgggagggtggtcaggcgcccctctgagggcttcctctgggaagggctaggcttgcaagggggtgtttgggggcggaatataggtttgtctgagggatgagtagcttggtcttgatcagcaatctgggaaggcctgtaggaagtaggggtgccctggcttggaaggtccacttcacagcttccataccagacctcctaggggtggagtggatgggagcccatcttggattctaccatggctcttgccttgccttaaaatctatgctttgggttgtcacttttccctcttccttcctcctttccatttatctattcttccctatagccatccattcatccattcatcctcatttattcatccattcattcattcatcaatccttatccatccatccattagtccctccatccttatccatctatccatccatccatccatccatccacccatctattcatccatccatcaatccatccatccattccatccatccatccatccatccatccatccatccctccatccattcatccacttgtccgtccatccatccatccatccatccatccatccatccatccgtccatctatccatccatccattcatccatccgtccatccattcagccatccatctgtccatttatccatcctccatttatccatgcatctattctcattcatccatgcatttgttcttccttctttctatctagccatccattctcattcatccatgcatttgtttttccttctatctatccatccatccattcattcatccacccatccacctatctatgcatgcatccatccatcctcatccactcatccacccatcctcacctatccatccatccacccattctttcttgcttctatccattttcccatccacacacctatccattcatccattcatacatcaatttattctccatccatccatccatcctcatccattcccattcatccatccatcctgtcttccttccttgcatccactcatcctcatccatttacccatccatccatccatcctcacccatccatctacacatccttcctttcatccacccattcatctactcatccacccatccatcctttcattcatttattcatttagccactcatttatgtgctaacttgtttattcattcattctcttactcattaatttacttataattcacttgtcccctcacccacccactcacgatctttagaccttccttttgtgcccagttagtgacaagtgagaagacacttttctggtcttgggtttcctgtcctggggtaggaatgggtgtttgggaagaaacatactgaagaccagactgaaggaggaggtaacgtctagggtgtctgaatcccccttcttggtgtcccctggggggcttgcttaccacccagtttgaggggcagacatattggcttcttctgtgtcttggatcaggccttgagctgctggaacaggagcagctgtgtgagggcatcagtgtcctctctctccctggctgccccctgcccctgagaaccaggtatacacccacccaggtggaagggtccattctgcagggaaggtcttccaggggcctggagcccaaggacttatcaaggctccctcctcctcagtttctcactcagcccctctcccattattattattattattattattattattattattacatcagggatcttgttagattctagataaaaatactcaaactccaatcatggggagagctcatgggatggggggctcatctggactggtactgacactgagaaccagatgcccctggccaactggatcacttggactcaggagcatcgcccacccccaccagatctgggggctgggctagttcttggctactccaagtttatcagagccacaaatgtgtgcagggtgaggacgtacaaagtgcctctctctcactagtacaacaggtgggcagtatcaccaaacaggccaagagctcccctgtgactgggcatccctagaatcctgcacatcacaggtaggacctcctctacttgctcagcctttggttctggtccagggcagggattgggcaagatcagcccttctccttccctccatgcctgaccttccagcaggtggcttttctcatgtcactgagcctcccttatacatctataaatgtttacctataaatgagcccattccctagaaatatattgtgaatattaaataagaggcagtaaataaattgcccggtataggggcttctctggactgttttatcttcataaataatgtgaatcctggagggcaaggtggctcatgcctgtaatcctagcactttgggaggccaaggcagatggatctcacttgaggtcaggagttcgagaccagcctggccaacatgatgaagccccgtctctagtaaaaatacaaaaattagccgggcatggtagcgagcgcctgtaatctcagctacttgggaggctgaggcatgaaaatcacttgaacccaggaggtggaggctgcagcgagctgagattgcaccactgcagtccagcctgggcgacagagcgagactccatctgaaaaaaaaaaaaaaaaaaaggaaaaagaaaaaatcctgtttccctttttgctttgcccaccaaggagctcagggccgagcttgtggctcagctataacagcattttcattcattcattcattcattcattcattttttaattcatttgcttatttagcaaattttcttgatcataagtttctcattgtttcattttattcaaggcatgttttgttgtaaaaagtctgaaaatcatatgcagccgagttggcagtcttttcttttgtggtttgtacatttttgtcatgtttaagacaacttccatgtctcaagatcataaagatagtctcctatctttatgttccaggtactggggaaagagaagtgaacacaatagatgtgattcctgcctctatggtactgataacccagggaaggagatagattaaaaaataagaaaaacatatagtaggatcaatgatgatacgtgtcatggagaaaaaagggaggcttgggaaaggtaggtgtgggtgcgttgtaataattgaaatagggagatcaggattgaaatagggggatctcagccttgctgagaaagtgacatttgaacagagacttgagagagatgaaggggggagtcatgcatgtatcagaggaagaacatttcctagtcagaaagaacagcctgtgcaaaggccctgaggtgggatagtgcctagtgttttgaggaagattgaggaggcccatgtggctggagtggagtgagtaagggggagagagggaggaggcgagggcagggaggtgatggaagcaggttgtggaggactttgtgggccaaggtgaggactttggcttcctttctgagtgatatgggcatgagggggacgtttccaagtatatttctgttgtagttctccccttacctccatcctgtgatgtgtgaggctgagtgaaaataaacccaccacataagtgcaggagagctggctcattgtctggggtggggataggtggggactgaccacagtgttgctgtgactcatgtccccctaaatggccacattctccctgcgctcagagccagggtgctcatcccatccctgcttctaaacttctctgagatatgacggacagggcaggtaaagctactccatgaggtggaatcatggaagaaaaacacagatggttcttttttttctttatgaagctgtcttccactaaataattatttttgacaagtgtgggagaaagggtaatcagatgcatgtgggggatgctggaagggcaaagggatggctgaggtgggagatgagtcagtgaggaagtggccaggaatagttctcaaggcattgcatggtaggtaaacaggaaggtaaacagctcaggcaaacaggaagagctggagataagttggagataaactggttactctggggaggaaggccatggaggggaaaggaagtaaaggcttcaacttgccctgcaaataccatgactcctgagggtctgtcacctatgacaagcagactcatttcttggctgcctagtctgggccagtggttgtgctggtgatttatcctagattttgtttgaccctctgaaaaagccttcattattatgatctccattaacagatggggaaactgtgactcagagcagttatgtatcttgcctaatattacttagttggtgactgggccacttcccgcctcatcactgcaccagtgtcattggctaactttctattccttgagattctttcctgcctcaggtctttgcatttgctttccctctgcctggaatttccctgagtctttaaatgactcttttttccatcttcaggtctcggttccaatgccacctcctcagaaaggccctccctgtacatccagtctaaataagagccccagttatttgtgttgagcatgtacccatagtaggtgttcaataaatacttgttgaacaaatcaatgaagtgaataggttcagatgagcctcttagtaaaagcttccattgtagctcttacttaattcaagagttagatcctgtgtcaccaggttttatgatctggaggatgaggatggggattcttctgttgcattcacccaaaaagcttttgtatttgggacagagcctgtcatgcaagtgtgtgagaaatattgttgaattgaatctgaggtttgataaggaaacaggagccatgttatggggcagagggagacaaagaaggagggtgtcacgtaagtctttccttcattcattcactcactcatctgtccactcattcactcactcatttattcttgcactcatccactcactcattcacttactcatcattcattgattcactcactaatttattcattcagccactcatccattcacccactcattcattcactcattcatccattcacccactcattcactcacccactaattcaatcccttcctcccttactcattcattcatgcactcatgtattcattcatgcactccagtccctcactcattcatccactcactcacgaattcattcattcatccactcactcactaattcattcatccactcactcacgaattcattcattcatccactcactcactaattcattcattcattcactcactaatttgttcactctctcattcactcactcactcattcacacattcactcactcatccacccatccatccatgcgttcatgcacccatccatccatgcatgcgtgcatgcattcatccatccatccatttatttattcacccacaaccttccagaaacaatgaaatctattccttttggaatagatttcaaagggtggcccttacagaacctgccctttgataagaagatggacaaccttcaggtgaacaaatagacaatcagtactgtgtcagatgctactgagggctgtgagcttatggctggggcattcggggactgggcaggtcagggaaggtccctctgaggaggtgacatttgaaccaagacctagaaaaccttagtaagtgaaagaagccagccacaaaaggacatatgttgtctgacttcatttgtgtgaaatatttgaaacatgattcttagagacaataagcagattggtggttgccaggggctgggggagaggtgggaatgggagtgactgctaatggggatgggatttctttgaggatgatgaaaatgttttggctggaggcactcactgcacaccattgtggcaggcgagaattctaccactgaaccactgatgcctgactgcacaccattgtgaaggcactaaaggccacattggattggacactttaaaatgattaattttatgttatgtaaatttcacctcaattaaaaaaatgctaatgaggccgggtgcggtggctcacgcctataatcccagcactttgagaggctgaggtgggtggatcacttgaggccaggagttcgagaccatcctggctgacgtgatgaaaccctgtctctactaaaaatacaaaaattagctgggcgtggtggtgggtgcctgtaatcccagctacttgggaggctgagacttgagaatcacttgaacccaggaggcggaggttgcagtgagccaagatcgtgccgctgcactccagcctgggtgacagagcaagactatgtttaaaaaaaaaaaaaaaaagctagtgagtctgccatgcccagaggaaggcctgcacctgagatcaaaagggacagagagatcagggaacagggcgcagagtatgaggatatgggaggagaatcaccccttgttggcccccacttggaaatgggggcgtgggagccctgccagccctggctttgtgggtatgccagggtgacagggtgtgaagcgcctggacctgcctgggtagggaagtaactcacatgcacacacactcccgc
